(19) United States
(12) Patent Application Publication
(10) Pub. No.: US 2024/0158451 A1
(43) Pub. Date: May 16, 2024

(54) BIOSYNTHESIS OF MOGROSIDES

(71) Applicant: Ginkgo Gioworks, Inc., Boston, MA (US)

(72) Inventors: Diveena Becker, Quincy, MA (US); Josef Bober, South Boston, MA (US); Justin Michael Gardin, Watertown, MA (US); Matthew McMahon, Melrose, MA (US)

(21) Appl. No.: 18/281,479

(22) PCT Filed: Mar. 11, 2022
(86) PCT No.: PCT/US2022/019977

§ 371 Date: Sep. 11, 2023

Related U.S. Application Data
(60) Provisional application No. 63/160,712, filed on Mar. 12, 2021.

(51) Int. Cl. C07K 14/415; C12N 9/02; C12N 9/14; C12N 9/90; C12N 15/52; C12P 19/56; C12P 33/20

(52) U.S. Cl. CPC C07K 14/415; C12N 9/0071; C12N 9/0083; C12N 9/14; C12N 9/90; C12N 15/52; C12P 19/56; C12P 33/20; C12Y 114/14001; C12Y 114/99007; C12Y 303/02003; C12Y 504/99007; C12Y 504/99033

(57) ABSTRACT

Described in this application are proteins and host cells involved in methods of producing mogrol precursors, mogrol, and/or mogrosides.

### CROSS-REFERENCE TO RELATED APPLICATIONS

[0001] This application claims the benefit under 35 U.S.C. § 119(e) of U.S. Provisional Application No. 63/160,712, filed Mar. 12, 2021, entitled “BIOSYNTHESIS OF MOGROSIDES,” the entire disclosure of which is hereby incorporated by reference in its entirety.

### FIELD OF THE INVENTION

[0002] The present disclosure relates to the production of mogrol precursors, mogrol and mogrosides in recombinant cells.

[0003] REFERENCE TO A SEQUENCE LISTING SUBMITTED AS A TEXT FILE VIA EFS-WEB

[0004] The instant application contains a Sequence Listing which has been submitted in ASCII format via EFS-Web and is hereby incorporated by reference in its entirety. The ASCII file, created on Mar. 11, 2022, is named G091970076WO00-SEQ-FL.TXT and is 686,922 bytes in size.

### BACKGROUND

[0005] Mogrosides are glycosides of cucurbitane derivatives. Highly sought after as sweeteners and sugar alternatives, mogrosides are naturally synthesized in the fruits of plants, including Siraitia grosvenorii (S. grosvenorii). Although anti-cancer, anti-oxidative, and anti-inflammatory properties have been ascribed to mogrosides, characterization of the exact proteins involved in mogroside biosynthesis is limited. Furthermore, mogroside extraction from fruit is labor-intensive and the structural complexity of mogrosides often hinders de novo chemical synthesis.

### SUMMARY

[0006] Aspects of the present disclosure provide host cells and methods useful for the production of mogrol and/or mogrosides. In some embodiments, the host cell comprises a heterologous polynucleotide encoding a cytochrome b5 (CB5), wherein the host cell is capable of producing more mogrol than a control host cell that does not comprise the heterologous polynucleotide, and wherein the CB5 comprises: the amino acid sequence YTGLSP (SEQ ID NO: 47); the amino acid sequence KPLLMAIKGQIYDVS (SEQ ID NO: 48); the amino acid sequence LQDWEYKFM (SEQ ID NO: 49); and/or the amino acid sequence X₁X₂X₃EX₄GX₅X₆X₇X₈X₉X₁₀D (SEQ ID NO: 53), wherein: X₁ is the amino acid K or E; X₂ is the amino acid P or H; X₃ is the amino acid A or S; X₄ is the amino acid D or N; X₅ is the amino acid P or H; X₆ is the amino acid S or R; X₇ is the amino acid E or N; X₈ is the amino acid S or F; X₉ is the amino acid Q or E; and/or X₁₀ is the amino acid A or I.

[0007] In some embodiments, the CB5 comprises: the amino acid sequence X₁X₂X₃X₄X₅X₆X₇EX₈IX₉X₁₀YTGLSPX₁₁X₁₂FFTX₁₃LAX₁₄X₁₅X₁₆X₁₇VX₁₈X₁₉X₂₀X₂₁SX₂₂X₂₃F X₂₄X₂₅X₂₆X₂₇X₂₈X₂₉X₃₀X₃₁ (SEQ ID NO: 50), wherein: X₁ is the amino acid E or Q; X₂ is the amino acid L or V; X₃ is the amino acid Y or W; X₄ is the amino acid W or E; X₅ is the amino acid K or T; X₆ is the amino acid A or L; X₇ is the amino acid M or K; X₈ is the amino acid Q or A; X₉ is the amino acid A or V; X₁₀ is the amino acid W or A; X₁₁ is the amino acid T or A; X₁₂ is the amino acid A or T; X₁₃ is the amino acid I or V; X₁₄ is the amino acid S or L; X₁₅ is the amino acid M or G; X₁₆ is the amino acid I or L; X₁₇ is the amino acid F or A; X₁₈ is the amino acid F or Y; X₁₉ is the amino acid Q or Y; X₂₀ is the amino acid M or V; X₂₁ is the amino acid V or I; X₂₂ is the amino acid S or G; X₂₃ is the amino acid M or F; X₂₄ is the amino acid V or G; X₂₅ is the amino acid S or T; X₂₆ is the amino acid P or S; X₂₇ is the amino acid E or D; X₂₈ is the amino acid E or Y; X₂₉ is the amino acid F or G; X₃₀ is the amino acid N or S; and/or X₃₁ is the amino acid K or H; the amino acid sequence X₁VQX₂GX₃X₄X₅EX₆X₇LX₈X₉YDGSDX₁₀X₁₁KPLLMAIKGQIYDVSX₁₂X₁₃RMF (SEQ ID NO: 51), wherein: X₁ is the amino acid P or A; X₂ is the amino acid V or I; X₃ is the amino acid E or Q; X₄ is the amino acid I or L; X₅ is the amino acid S or T; X₆ is the amino acid E or Q; X₇ is the amino acid E or Q; X₈ is the amino acid K or R; X₉ is the amino acid Q or A; X₁₀ is the amino acid S or P; X₁₁ is the amino acid K or N; X₁₂ is the amino acid Q or S; and/or X₁₃ is the amino acid S or G; and/or the amino acid sequence LAX₁X₂SFX₃X₄X₅DX₆TGX₇IX₈GLX₉X₁₀X₁₁ELX₁₂X₁₃LQDWEYKFMX₁₄KYVKVGX₁₅X₁₆ (SEQ ID NO: 52), wherein: X₁ is the amino acid K or L; X₂ is the amino acid M or L; X₃ is the amino acid E or K; X₄ is the amino acid E or P; X₅ is the amino acid K or E; X₆ is the amino acid L or I; X₇ is the amino acid D or N; X₈ is the amino acid S or E; X₉ is the amino acid G or S; X₁₀ is the amino acid P or E; X₁₁ is the amino acid F or E; X₁₂ is the amino acid E or V; X₁₃ is the amino acid A or I; X₁₄ is the amino acid S or E; X₁₅ is the amino acid T or E; and/or X₁₆ is the amino acid V or L.

[0008] In some embodiments, the CB5 comprises one or more of the following amino acid sequences: QVWETLKEAIVAYTGLSPATFFTVLALGLAVYYVISGFFGTSDYGSH (SEQ ID NO: 58) or ELYWKAMEQIAWYTGLSPTAFFTILASMIFVFQMVSSMFVSPEEFNK (SEQ ID NO: 59); PVQVGEISEEELKQYDGSDSKKPLLMAIKGQIYDVSQSRMF (SEQ ID NO: 60) or AVQIGQLTEQQLRAYDGSDPNKPLLMAIKGQIYDVSSGRMF (SEQ ID NO: 61); LAKMSFEEKDLTGDISGLGPFELEALQDWEYKFMSKYVKVGTV (SEQ ID NO: 62) or LALLSFKPEDITGNIEGLSEEELVILQDWEYKFMEKYVKVGEL(SEQ ID NO: 63); and KPAEDGPSESQAD (SEQ ID NO: 64) or EHSENGHRNFEID (SEQ ID NO: 65).

[0009] In some embodiments, the CB5 comprises: the amino acid sequence YTGLSP (SEQ ID NO: 47) at residues corresponding to positions 16-21 in SEQ ID NO: 1; the amino acid sequence KPLLMAIKGQIYDVS (SEQ ID NO: 48) at residues corresponding to positions 85-99 in SEQ ID NO: 1; and/or the amino acid sequence LQDWEYKFM (SEQ ID NO: 49) at residues corresponding to positions 148-156 in SEQ ID NO: 1

[0010] In some embodiments, the CB5 comprises the amino acid sequence X₁X₂X₃EX₄GX₅X₆X₇X₈X₉X₁₀D (SEQ ID NO: 53) at residues corresponding to positions 190-202 of SEQ ID NO: 1.

[0011] In some embodiments, the CB5 comprises: the amino acid sequence X₁X₂X₃X₄X₅X₆X₇EX₈IX₉X₁₀YTGLSPX₁₁X₁₂FFTX₁₃LAX₁₄X₁₅X₁₆X₁₇VX₁₈X₁₉X₂₀X₂₁SX₂₂X₂₃F X₂₄X₂₅X₂₆X₂₇X₂₈X₂₉X₃₀X₃₁ (SEQ ID NO: 50) at residues corresponding to positions 4-50 of SEQ ID NO: 1; the amino acid sequence X₁VQX₂GX₃X₄X₅EX₆X₇LX₈X₉YDGSDX₁₀X₁₁KPLLMAIKGQIYDVSX₁₂X₁₃RMF (SEQ ID NO: 51) at residues corresponding to positions 64-104 of SEQ ID NO: 1; and/or the amino acid sequence LAX₁X₂SFX₃X₄X₅DX₆TGX₇IX₈GLX₉X₁₀X₁₁ELX₁₂X₁₃LQDWEYKFMX₁₄KYVKVGX₁₅X₁₆ (SEQ ID NO: 52) at residues corresponding to positions 123-165 of SEQ ID NO: 1.

[0012] In some embodiments, the CB5 comprises at most one histidine in one or more of the following regions: a region corresponding to positions 64-104 of SEQ ID NO: 1; a region corresponding to positions 105-122 of SEQ ID NO: 1; and/or a region corresponding to positions 123-165 of SEQ ID NO: 1.

[0013] In some embodiments, the CB5 comprises no histidine residues in: a region corresponding to positions 64-104 of SEQ ID NO: 1; a region corresponding to positions 105-122 of SEQ ID NO: 1; and/or a region corresponding to positions 123-165 of SEQ ID NO: 1.

[0014] In some embodiments, the CB5 comprises a sequence that is at least 90% identical to any one of SEQ ID NOs: 1-3 and 318 In some embodiments, the CB5 comprises the sequence of any one of SEQ ID NOs: 1-3 and 318.

[0015] In some embodiments, the heterologous polynucleotide comprises a sequence that is at least 90% identical to any one of SEQ ID NOs: 11-14, 22-24, 316-317, and 330-331. In some embodiments, the heterologous polynucleotide comprises the sequence of any one of SEQ ID NOs: 11-14, 22-24, 316-317, and 330-331.

[0016] Further aspects of the present disclosure relate to host cells that comprise a heterologous polynucleotide encoding a cytochrome b5 (CB5), wherein the CB5 comprises a sequence that is at least 90% identical to any one of SEQ ID NOs: 1-10 and 318 and wherein the host cell is capable of producing mogrol.

[0017] In some embodiments, the CB5 comprises the sequence of any one of SEQ ID NOs: 1-10 and 318.

[0018] Further aspects of the present disclosure provide host cells that comprise a heterologous polynucleotide encoding a cytochrome b5 (CB5), wherein the CB5 comprises a sequence that is at least 90% identical to any one of SEQ ID NOs: 1-4 and 318 and wherein the host cell is capable of producing more mogrol than a control host cell that does not comprise the heterologous polynucleotide.

[0019] Further aspects of the present disclosure provide host cells that comprise a heterologous polynucleotide encoding a cytochrome b5 (CB5), wherein the heterologous polynucleotide comprises a sequence that is at least 90% identical to any one of SEQ ID NOs: 11-24, 316-317, and 330-331, and wherein the host cell is capable of producing mogrol.

[0020] In some embodiments, the heterologous polynucleotide comprises the sequence of any one of SEQ ID NOs: 11-24, 316-317, and 330-331.

[0021] Further aspects of the present disclosure provide host cells that comprise a heterologous polynucleotide encoding a cytochrome b5 (CB5), wherein the CB5 comprises: the amino acid sequence ILRVSFRKYRKAIEQ (SEQ ID NO: 54); the amino acid sequence RAFRPSIRFKKSHSTVPT (SEQ ID NO: 55); the amino acid sequence KNTLYVGG (SEQ ID NO: 56); and/or the amino acid sequence DQATQKHRSFGFVTFLEKED (SEQ ID NO: 57) and wherein the host cell is capable of producing more mogrol than a control host cell that does not comprise the heterologous polynucleotide.

[0022] In some embodiments, the CB5 comprises: the amino acid sequence ILRVSFRKYRKAIEQ (SEQ ID NO: 54) at residues corresponding to positions 23-37 of SEQ ID NO: 4; the amino acid sequence RAFRPSIRFKKSHSTVPT (SEQ ID NO: 55) at residues corresponding to positions 53-70 of SEQ ID NO: 4; the amino acid sequence KNTLYVGG (SEQ ID NO: 56) at residues corresponding to positions 168-175 of SEQ ID NO: 4; and/or the amino acid sequence DQATQKHRSFGFVTFLEKED (SEQ ID NO: 57) at residues corresponding to positions 203-222 of SEQ ID NO: 4.

[0023] In some embodiments, the CB5 comprises a sequence that is at least 90% identical to SEQ ID NO: 4.

[0024] In some embodiments, the CB5 comprises SEQ ID NO: 4.

[0025] In some embodiments, the heterologous polynucleotide comprises a sequence that is at least 90% identical to SEQ ID NO: 15.

[0026] In some embodiments, the heterologous polynucleotide comprises SEQ ID NO: 15.

[0027] In some embodiments, the host cell is capable of producing more than 13.5 mg/L mogrol.

[0028] In some embodiments, the host cell further comprises one or more heterologous polynucleotides encoding one or more of: a UDP-glycosyltransferases (UGT) enzyme, a cucurbitadienol synthase (CDS) enzyme, a C11 hydroxylase, a cytochrome P450 reductase, an epoxide hydrolase (EPH), a lanosterol synthase and a squalene epoxidase (SQE). In some embodiments, the UGT enzyme comprises a sequence that is at least 90% identical to SEQ ID NO: 121. In some embodiments, the CDS enzyme comprises a sequence that is at least 90% identical to any one of SEQ ID NOs: 226, SEQ ID NO: 235, and SEQ ID NO: 232. In some embodiments, the C11 hydroxylase comprises a sequence that is at least 90% identical to any one of SEQ ID NOs: 280-281, 305,315, and 324. In some embodiments, the cytochrome P450 reductase comprises a sequence that is at least 90% identical to any one of SEQ ID NOs: 282-283 and 306-307. In some embodiments, the EPH comprises a sequence that is at least 90% identical to any one of SEQ ID NOs: 284-292 and 309-310. In some embodiments, the SQE comprises a sequence that is at least 90% identical to any one of SEQ ID NOs: 293-295, 312, or 328.

[0029] In some embodiments, the lanosterol synthase comprises a sequence that is at least 90% identical to SEQ ID NO: 329 or 336. In some embodiments, the SQE comprises a sequence that is at least 90% identical to SEQ ID NO: 312 or 328.

[0030] In some embodiments, the host cell is a yeast cell, a plant cell, or a bacterial cell. In some embodiments, the host cell is a yeast cell. In some embodiments, the yeast cell is a Saccharomyces cerevisiae or Yarrowia lipolytica cell. In some embodiments, the host cell is a bacterial cell. In some embodiments, the bacterial cell is an E. coli cell.

[0031] Further aspects of the present disclosure relate to methods of producing mogrol comprising culturing any of the host cells of the disclosure.

[0032] Further aspects of the present disclosure relate to methods of producing a mogroside comprising culturing any of the host cells of the disclosure.

[0033] In some embodiments, the mogroside is selected from mogroside I-A1 (MIA1), mogroside IE (MIE), mogroside II-A1 (MIIA1), mogroside II-A2 (MIIA2), mogroside III-A1 (MIIIA1), mogroside II-E (MIIE), mogroside III (MITI), siamenoside I, mogroside IV (MIV), mogroside IVa (MIVA), isomogroside IV, mogroside III-E (MIIIE), mogroside V (MV), and/or mogroside VI (MVI).

[0034] Further aspects of the disclosure relate to bioreactors for producing mogrol or mogrosides, wherein the bioreactor comprises any of the host cells of the disclosure.

[0035] Further aspects of the disclosure relate to non-naturally occurring polynucleotides comprising a sequence that is at least 90% identical to any one of SEQ ID NOs: 11-14, 22-24, 316-317, and 330-331. In some embodiments, the polynucleotide encodes a cytochrome b5 (CB5) comprising a sequence that is at least 90% identical to any one of SEQ ID NOs: 1-10 and 318.

[0036] Further aspects of the disclosure relate to expression vectors comprising any of the non-naturally occurring polynucleotides of the disclosure.

[0037] Each of the limitations of the invention can encompass various embodiments of the invention. It is, therefore, anticipated that each of the limitations of the invention involving any one element or combinations of elements can be included in each aspect of the invention. This invention is not limited in its application to the details of construction and the arrangement of components set forth in the following description or illustrated in the drawings. The invention is capable of other embodiments and of being practiced or of being carried out in various ways.

### BRIEF DESCRIPTION OF DRAWINGS

[0038] The accompanying drawings are not intended to be drawn to scale. The drawings are illustrative only and are not required for enablement of the disclosure. For purposes of clarity, not every component may be labeled in every drawing. In the drawings:

[0039] FIGS. 1A-1D include schematic overviews of putative mogrol biosynthesis pathways. SQS indicates squalene synthase, EPD indicates epoxidase, P450 indicates C11 hydroxylase, EPH indicates epoxide hydrolase, and CDS indicates cucurbitadienol synthase. FIG. 1A and FIG. 1B show putative mogrol biosynthesis pathways. FIG. 1C shows non-limiting examples of primary UGT activity. FIG. 1D shows non-limiting examples of secondary UGT activity.

[0040] FIGS. 2A-2B include graphs depicting mogrol production by strains comprising candidate proteins involved in mogroside biosynthesis that were included in a library that was screened as described in Example 1. Parent strain 669889 is the control base strain without a candidate protein. FIG. 2A is a graph showing results for all strains in the screen. FIG. 2B is a graph showing mogrol production by strains comprising a cytochrome b5 (CB5).

[0041] FIGS. 3A-3B include graphs depicting mogrol production by Y. lipolytica strains. FIG. 3A is a graph depicting mogrol production by Y. lipolytica strains expressing a CB5 protein with a sequence corresponding to SEQ ID NO: 1 (strain 994375) or a truncated form of the same CB5 protein with a sequence corresponding to SEQ ID NO: 318 (strain 934903). Strain 974137 lacks any S. grosvenorii cytochrome b5 protein and was used as a negative control. FIG. 3B includes a graph depicting mogrol production by Y. lipolytica strains expressing a CB5 proteins with a sequence corresponding to SEQ ID NO: 1 (strain 1338488), SEQ ID NO: 2 (strain 1338489), SEQ ID NO: 3 (strain 1338490). Strain 1419596 lacks any S. grosvenorii cytochrome b5 protein and was used as a negative control.

### DETAILED DESCRIPTION

[0042] Mogrosides are widely used as natural sweeteners, for example in beverages. However, de novo synthesis and mogroside extraction from natural sources often involves high production costs and low yield. This disclosure provides host cells that are engineered to efficiently produce mogrol (or 11,24,25-trihydroxy cucurbitadienol), mogrosides, and precursors thereof. Methods include heterologous expression of cucurbitadienol synthase (CDS) enzymes, UDP-glycosyltransferase (UGT) enzymes, C11 hydroxylase enzymes, cytochrome P450 reductase enzymes, epoxide hydrolase (EPH) enzymes, squalene epoxidase (SQE) enzymes, or combinations thereof. Examples 1 and 2 describes the identification and functional characterization of proteins that increase mogrol production, including cytochrome b5 (CB5). Proteins and host cells described in this disclosure can be used for making mogrol, mogrosides, and precursors thereof.

### Synthesis of Mogrol and Mogrosides

[0043] FIGS. 1A-1B show putative mogrol synthesis pathways. An early step in the pathway involves conversion of squalene to 2,3-oxidoqualene. As shown in FIG. 1A, 2,3-oxidosqualene can be first cyclized to cucurbitadienol followed by epoxidation to form 24,25-epoxycucurbitadienol, or 2,3-oxidosqualene can be epoxidized to 2,3,22,23-dioxidosqualene and then cyclized to 24,25-epoxycucurbitadienol. Next, the 24,25-epoxycucurbitadienol can be converted to mogrol (an aglycone of mogrosides) following epoxide hydrolysis and then oxidation, or oxidation and then epoxide hydrolysis. As shown in FIG. 1B, 2,3-oxidosqualene can be first cyclized to cucurbitadienol, which is then converted to 11-hydroxycucurbitadienol by a cytochrome P450 C11 hydroxylase. Then, a cytochrome P450 C11 hydroxylase may convert 11-hydroxycucurbitadienol to 11-hydroxy-24,25-epoxycucurbitadienol. 11-hydroxy-24,25-epoxycucurbitadienol may be converted to mogrol by epoxide hydrolase. C11 hydroxylases act in conjunction with cytochrome P450 reductases (not shown in FIGS. 1A-1B).

[0044] Mogrol can be distinguished from other cucurbitane triterpenoids by oxygenations at C3, C11, C24, and C25. Glycosylation of mogrol, for example at C3 and/or C24, leads to the formation of mogrosides.

[0045] Mogrol precursors include but are not limited to squalene, 2-3-oxidosqualene, 2,3,22,23-dioxidosqualene, cucurbitadienol, 24, 25-expoxycucurbitadienol, 11-hydroxycucurbitadienol, 11-hydroxy-24,25-epoxycucurbitadienol, 11-hydroxy-cucurbitadienol, 11-oxo-cucurbitadienol, and 24,25-dihydroxycucurbitadienol. The term “dioxidosqualene” may be used to refer to 2,3,22,23-diepoxy squalene or 2,3,22,23-dioxido squalene. The term “2,3-epoxysqualene” may be used interchangeably with the term “2-3-oxidosqualene.” As used in this application, mogroside precursors include mogrol precursors, mogrol and mogrosides.

[0046] Examples of mogrosides include, but are not limited to, mogroside I-A1 (MIA1), mogroside IE (MIE or M1E), mogroside II-A1 (MIIA1 or M2A1), mogroside II-A2 (MIIA2 or M2A2), mogroside III-A1 (MIIIA1 or M3A1), mogroside II-E (MIIE or M2E), mogroside III (MIII or M3), siamenoside I, mogroside IV (MIV or M4), mogroside IVa (MIVA or M4A), isomogroside IV, mogroside III-E (MIIIE or M3E), mogroside V (MV or M5), and mogroside VI (MVI or M6). In some embodiments, the mogroside produced is siamenoside I, which may be referred to as Siam. In some embodiments, the mogroside produced is MIIIE. Unless otherwise noted, when used in the plural, the terms “M1s”, “MIs”, “M2s”, “MIIs”, “M3s”, “MIIIs”, “M4s”, “MIVs”, “MVs”, “M5s”, “M6s”, and “MVIs” each refer to a class of mogrosides. As a non-limiting example, M2s or MIIs may include MIIA1, MIIA, MIIA2, and/or MIIE.

[0047] In other embodiments, a mogroside is a compound of Formula 1:

[chemical structure]

[0048] In some embodiments, the methods described in this application may be used to produce any of the compounds described in and incorporated by reference from US 2019/0071705 (which granted as U.S. Pat. No. 11,060,124), including compounds 1-20 as disclosed in US 2019/0071705. In some embodiments, the methods described in this application may be used to produce variants of any of the compounds described in and incorporated by reference from US 2019/0071705, including variants of compounds 1-20 as disclosed in US 2019/0071705. For example, a variant of a compound described in US 2019/0071705 can comprise a substitution of one or more alpha-glucosyl linkages in a compound described in US 2019/0071705 with one or more beta-glucosyl linkages. In some embodiments, a variant of a compound described in US 2019/0071705 comprises a substitution of one or more beta-glucosyl linkages in a compound described in US 2019/0071705 with one or more alpha-glucosyl linkages. In some embodiments, a variant of a compound described in US 2019/0071705 is a compound of Formula 1 shown above.

[0049] In some embodiments, a host cell comprising one or more proteins described herein (e.g., a cytochrome b5 (CB5), a UDP-glycosyltransferase (UGT) enzyme, a cucurbitadienol synthase (CDS) enzyme, a C11 hydroxylase enzyme, a cytochrome P450 reductase enzyme, an epoxide hydrolase enzyme (EPH), a squalene epoxidase enzyme (SQE) and/or any proteins associated with the disclosure) is capable of producing at least 0.005 mg/L, at least 0.01 mg/L, at least 0.02 mg/L, at least 0.03 mg/L, at least 0.04 mg/L, at least 0.05 mg/L, at least 0.06 mg/L, at least 0.07 mg/L, at least 0.08 mg/L, at least 0.09 mg/L, at least 0.1 mg/L, at least 0.2 mg/L, at least 0.3 mg/L, at least 0.4 mg/L, at least 0.5 mg/L, at least 0.6 mg/L, at least 0.7 mg/L, at least 0.8 mg/L, at least 0.9 mg/L, at least 1 mg/L, at least 2 mg/L, at least 3 mg/L, at least 4 mg/L, at least 5 mg/L, at least 6 mg/L, at least 7 mg/L, at least 8 mg/L, at least 9 mg/L, at least 10 mg/L, at least 11 mg/L, at least 12 mg/L, at least 13 mg/L, at least 14 mg/L, at least 15 mg/L, at least 16 mg/L, at least 17 mg/L, at least 18 mg/L, at least 19 mg/L, at least 20 mg/L, at least 21 mg/L, at least 22 mg/L, at least 23 mg/L, at least 24 mg/L, at least 25 mg/L, at least 26 mg/L, at least 27 mg/L, at least 28 mg/L, at least 29 mg/L, at least 30 mg/L, at least 31 mg/L, at least 32 mg/L, at least 33 mg/L, at least 34 mg/L, at least 35 mg/L, at least 36 mg/L, at least 37 mg/L, at least 38 mg/L, at least 39 mg/L, at least 40 mg/L, at least 41 mg/L, at least 42 mg/L, at least 43 mg/L, at least 44 mg/L, at least 45 mg/L, at least 46 mg/L, at least 47 mg/L, at least 48 mg/L, at least 49 mg/L, at least 50 mg/L, at least 51 mg/L, at least 52 mg/L, at least 53 mg/L, at least 54 mg/L, at least 55 mg/L, at least 56 mg/L, at least 57 mg/L, at least 58 mg/L, at least 59 mg/L, at least 60 mg/L, at least 61 mg/L, at least 62 mg/L, at least 63 mg/L, at least 64 mg/L, at least 65 mg/L, at least 66 mg/L, at least 67 mg/L, at least 68 mg/L, at least 69 mg/L, at least 70 mg/L, at least 75 mg/L, at least 80 mg/L, at least 85 mg/L, at least 90 mg/L, at least 95 mg/L, at least 100 mg/L, at least 125 mg/L, at least 150 mg/L, at least 175 mg/L, at least 200 mg/L, at least 225 mg/L, at least 250 mg/L, at least 275 mg/L, at least 300 mg/L, at least 325 mg/L, at least 350 mg/L, at least 375 mg/L, at least 400 mg/L, at least 425 mg/L, at least 450 mg/L, at least 475 mg/L, at least 500 mg/L, at least 1,000 mg/L, at least 2,000 mg/L, at least 3,000 mg/L, at least 4,000 mg/L, at least 5,000 mg/L, at least 6,000 mg/L, at least 7,000 mg/L, at least 8,000 mg/L, at least 9,000 mg/L, or at least 10,000 mg/L of one or more mogrosides and/or mogroside precursors. In some embodiments, the mogroside is mogroside I-A1 (MIA1), mogroside IE (MIE or M1E), mogroside II-A1 (MIIA1 or M2A1), mogroside II-A2 (MIIA2 or M2A2), mogroside III-A1 (MIIIA1 or M3A1), mogroside II-E (MIIE or M2E), mogroside III (MIII or M3), siamenoside I, mogroside IV (MIV or M4), mogroside IVa (MIVA or M4A), isomogroside IV, mogroside III-E (MIIIE or M3E), mogroside V (MV or M5), or mogroside VI (MVI or M6).

### Cytochrome b5 (CB5)

[0050] Aspects of the present disclosure provide cytochrome b5 (CB5) proteins, which may be useful in promoting mogrol production. As used herein, a “cytochrome b5” or “CB5” refers to a protein that comprises a lipid binding domain or cytochrome b5-like heme binding domain. In some embodiments, a lipid binding domain is a steroid binding domain.

[0051] CB5 proteins are heme- or lipid-binding proteins. For example, a CB5 may be a steroid binding protein. Some have been implicated in electron transport and enzymatic redox reactions. CB5 proteins generally harbor a conserved CB5 domain (e.g., a cytochrome b5-like heme or steroid binding domain). The tertiary structure of the CB5 domain is highly conserved and the domain folds around two hydrophobic residue cores on each side of a beta sheet. Without wishing to be bound by any theory, one hydrophobic core may include the heme or lipid binding domain, while the other hydrophobic core may promote formation of the proper conformation. In some embodiments, a lipid binding domain is a steroid binding domain.

[0052] Without being bound by a particular theory, two histidine residues may be required for a CB5 to interact with the iron in heme and CB5s that do not comprise these conserved histidine residues may comprise a lipid binding domain (e.g., a steroid binding domain) instead of a heme-binding domain. In some embodiments, a CB5 that is capable of increasing mogrol production does not comprise two histidine residues in a region corresponding to positions 64-104 of SEQ ID NO: 1, in a region corresponding to positions 105-122 of SEQ ID NO: 1, and/or in a region corresponding to positions 123-165 of SEQ ID NO: 1. In some embodiments, a CB5 that is capable of increasing mogrol production comprises at most one histidine in a region corresponding to positions 64-104 of SEQ ID NO: 1, in a region corresponding to positions 105-122 of SEQ ID NO: 1, and/or in a region corresponding to positions 123-165 of SEQ ID NO: 1.

[0053] In some embodiments, a CB5 that is capable of increasing mogrol production comprises no histidine residues in a region corresponding to positions 64-104 of SEQ ID NO: 1, in a region corresponding to positions 105-122 of SEQ ID NO: 1, and/or in a region corresponding to positions 123-165 of SEQ ID NO: 1.

[0054] A non-limiting example of a CB5 domain is provided under Pfam Accession No. PF00173. The CB5 domain may form a majority of the protein's structure. See e.g., SEQ ID NOs: 1-3 or 318. In some embodiments, additional domains such as a fatty acid desaturase and/or a FMN-dependent dehydrogenase are also present.

[0055] CB5 proteins may serve as an electron transfer component of a redox reaction. For example, a CB5 may function as an obligate electron donor in an oxidative reaction. In some embodiments, a CB5 serves as an electron-delivery partner for a cytochrome P450 (e.g., a C11 hydroxylase). In some embodiments, a CB5 catalyzes or promotes electron transfer from NADPH to a cytochrome P450 enzyme (e.g., a C11 hydroxylase).

[0056] In some embodiments, a CB5 plays an allosteric role to promote mogrol production. As a non-limiting example, a CB5 may be involved in binding and positioning of cucurbitadienol or cucurbitadienol-like molecules to support P450 enzyme activity. In some embodiments, a CB5 sterically interacts with the P450 enzyme to support an enzyme conformation that promotes higher activity, without a direct enzymatic role of the CB5 itself.

[0057] The rate of an enzymatic redox reaction may be assessed by any suitable method, including determination of the change in product concentration over a period of time. Any suitable method including mass spectrometry may be used to measure the presence of a substrate or product. See also, e.g., Schenkman et al., Pharmacology & Therapeutics 97 (2003) 139-152; Gou et al., Plant Cell. 2019 June; 31(6):1344-1366; Interpro Accession No. IPR001199; Interpro Accession No. IPR018506; Lederer Biochimie. 1994; 76(7):674-92; GenBank Accession No. AF332415; UniProt Accession No. P40312.

[0058] In some embodiments, a CB5 is 200-300 amino acids in length (e.g., 210-290 amino acids in length, 205-215 amino acids in length, or 275-295 amino acids in length).

[0059] In some embodiments, a CB5 of the present disclosure comprises a sequence (e.g., nucleic acid or amino acid sequence) that is at least 5%, at least 10%, at least 15%, at least 20%, at least 25%, at least 30%, at least 35%, at least 40%, at least 45%, at least 50%, at least 55%, at least 60%, at least 65%, at least 70%, at least 71%, at least 72%, at least 73%, at least 74%, at least 75%, at least 76%, at least 77%, at least 78%, at least 79%, at least 80%, at least 81%, at least 82%, at least 83%, at least 84%, at least 85%, at least 86%, at least 87%, at least 88%, at least 89%, at least 90%, at least 91%, at least 92%, at least 93%, at least 94%, at least 95%, at least 96%, at least 97%, at least 98%, at least 99%, or is 100% identical, including all values in between, to any one of SEQ ID NOs: 1-24, 316-318, 330-331, or any CB5 sequence disclosed in this application or known in the art. In some embodiments, a CB5 of the present disclosure comprises a sequence that is a conservatively substituted version of any one of SEQ ID NOs: 1-10 and 318.

[0060] In some embodiments, a CB5 comprises one or more motifs. As a non-limiting example, a motif may distinguish a CB5 that is capable of increasing mogrol production from a CB5 that does not increase mogrol production relative to a control.

[0061] In some embodiments, a CB5 comprises the amino acid sequence YTGLSP (SEQ ID NO: 47); the amino acid sequence KPLLMAIKGQIYDVS (SEQ ID NO: 48); and/or the amino acid sequence LQDWEYKFM (SEQ ID NO: 49). In some embodiments, the CB5 comprises the amino acid sequence YTGLSP (SEQ ID NO: 47) at residues corresponding to positions 16-21 in SEQ ID NO: 1; the amino acid sequence KPLLMAIKGQIYDVS (SEQ ID NO: 48) at residues corresponding to positions 85-99 in SEQ ID NO: 1; and/or the amino acid sequence LQDWEYKFM (SEQ ID NO: 49) at residues corresponding to positions 148-156 in SEQ ID NO: 1. In some embodiments, a CB5 comprises the amino acid sequence YTGLSP (SEQ ID NO: 47); the amino acid sequence KPLLMAIKGQIYDVS (SEQ ID NO: 48); and/or the amino acid sequence LQDWEYKFM (SEQ ID NO: 49). In some embodiments, the CB5 comprises the amino acid sequence YTGLSP (SEQ ID NO: 47) at residues corresponding to positions 16-21 in SEQ ID NO: 1; the amino acid sequence KPLLMAIKGQIYDVS (SEQ ID NO: 48) at residues corresponding to positions 85-99 in SEQ ID NO: 1; and the amino acid sequence LQDWEYKFM (SEQ ID NO: 49) at residues corresponding to positions 148-156 in SEQ ID NO: 1.

[0062] In some embodiments, a CB5 comprises the amino acid sequence X₁X₂X₃X₄X₅X₆X₇EX₈IX₉X₁₀YTGLSPX₁₁X₁₂FFTX₁₃LAX₁₄X₁₅X₁₆X₁₇VX₁₈X₁₉X₂₀X₂₁SX₂₂X₂₃F X₂₄X₂₅X₂₆X₂₇X₂₈X₂₉X₃₀X₃₁ (SEQ ID NO: 50), in which X₁ is the amino acid E or Q; X₂ is the amino acid L or V; X₃ is the amino acid Y or W; X₄ is the amino acid W or E; X₅ is the amino acid K or T; X₆ is the amino acid A or L; X₇ is the amino acid M or K; X₈ is the amino acid Q or A; X₉ is the amino acid A or V; X₁₀ is the amino acid W or A; X₁₁ is the amino acid T or A; X₁₂ is the amino acid A or T; X₁₃ is the amino acid I or V; X₁₄ is the amino acid S or L; X₁₅ is the amino acid M or G; X₁₆ is the amino acid I or L; X₁₇ is the amino acid F or A; X₁₈ is the amino acid F or Y; X₁₉ is the amino acid Q or Y; X₂₀ is the amino acid M or V; X₂₁ is the amino acid V or I; X₂₂ is the amino acid S or G; X₂₃ is the amino acid M or F; X₂₄ is the amino acid V or G; X₂₅ is the amino acid S or T; X₂₆ is the amino acid P or S; X₂₇ is the amino acid E or D; X₂₈ is the amino acid E or Y; X₂₉ is the amino acid F or G; X₃₀ is the amino acid N or S; and/or X₃₁ is the amino acid K or H. As a non-limiting example, a CB5 comprising SEQ ID NO: 50 may comprise the amino acid sequence QVWETLKEAIVAYTGLSPATFFTVLALGLAVYYVISGFFGTSDYGSH (SEQ ID NO: 58) or the amino acid sequence ELYWKAMEQIAWYTGLSPTAFFTILASMIFVFQMVSSMFVSPEEFNK (SEQ ID NO: 59). In some embodiments, a CB5 may comprise SEQ ID NO: 50 at residues corresponding to positions 4-50 of SEQ ID NO: 1.

[0063] In some embodiments, a CB5 comprises the amino acid sequence X₁VQX₂GX₃X₄X₅EX₆X₇LX₈X₉YDGSDX₁₀X₁₁KPLLMAIKGQIYDVSX₁₂X₁₃RMF (SEQ ID NO: 51), wherein: X₁ is the amino acid P or A; X₂ is the amino acid V or I; X₃ is the amino acid E or Q; X₄ is the amino acid I or L; X₅ is the amino acid S or T; X₆ is the amino acid E or Q; X₇ is the amino acid E or Q; X₈ is the amino acid K or R; X₉ is the amino acid Q or A; X₁₀ is the amino acid S or P; X₁₁ is the amino acid K or N; X₁₂ is the amino acid Q or S; and/or X₁₃ is the amino acid S or G. As a non-limiting example, a CB5 comprising SEQ ID NO: 51 may comprise the amino acid sequence PVQVGEISEEELKQYDGSDSKKPLLMAIKGQIYDVSQSRMF (SEQ ID NO: 60) or AVQIGQLTEQQLRAYDGSDPNKPLLMAIKGQIYDVSSGRMF (SEQ ID NO: 61). In some embodiments, a CB5 may comprise SEQ ID NO: 51 at residues corresponding to positions 64-104 of SEQ ID NO: 1.

[0064] In some embodiments, a CB5 comprises the amino acid sequence LAX₁X₂SFX₃X₄X₅DX₆TGX₇IX₈GLX₉X₁₀X₁₁ELX₁₂X₁₃LQDWEYKFMX₁₄KYVKVGX₁₅X₁₆ (SEQ ID NO: 52), in which: X₁ is the amino acid K or L; X₂ is the amino acid M or L; X₃ is the is the amino acid P or E; X₁₁ is the amino acid F or E; X₁₂ is the amino acid E or V; X₁₃ is the amino acid A or I; X₁₄ is the amino acid S or E; X₁₅ is the amino acid T or E; and/or X₁₆ is the amino acid V or L. In some embodiments, a CB5 comprising SEQ ID NO: 52 may comprise LAKMSFEEKDLTGDISGLGPFELEALQDWEYKFMSKYVKVGTV (SEQ ID NO: 62) or LALLSFKPEDITGNIEGLSEEELVILQDWEYKFMEKYVKVGEL (SEQ ID NO: 63). In some embodiments, a CB5 comprises SEQ ID NO: 52 at residues corresponding to positions 123-165 of SEQ ID NO: 1.

[0065] In some embodiments, a CB5 comprises the amino acid sequence X₁X₂X₃EX₄GX₅X₆X₇X₈X₉X₁₀D (SEQ ID NO: 53), in which: X₁ is the amino acid K or E; X₂ is 10 the amino acid P or H; X₃ is the amino acid A or S; X₄ is the amino acid D or N; X₅ is the amino acid P or H; X₆ is the amino acid S or R; X₇ is the amino acid E or N; X₈ is the amino acid S or F; X₉ is the amino acid Q or E; and/or X₁₀ is the amino acid A or I. In some embodiments, a CB5 comprising SEQ ID NO: 53 comprises KPAEDGPSESQAD (SEQ ID NO: 64) or EHSENGHRNFEID (SEQ ID NO: 65). In some embodiments, a CB5 comprises SEQ ID NO: 53 at residues corresponding to positions 190-202 of SEQ ID NO: 1.

[0066] In some embodiments, a CB5 comprises the amino acid sequence X₁X₂X₃X₄X₅X₆X₇EX₈IX₉X₁₀YTGLSPX₁₁X₁₂FFTX₁₃LAX₁₄X₁₅X₁₆X₁₇VX₁₈X₁₉X₂₀X₂₁SX₂₂X₂₃F X₂₄X₂₅X₂₆X₂₇X₂₈X₂₉X₃₀X₃₁ (SEQ ID NO: 50), in which X₁ is the amino acid E or Q; X₂ is the amino acid L or V; X₃ is the amino acid Y or W; X₄ is the amino acid W or E; X₅ is the amino acid K or T; X₆ is the amino acid A or L; X₇ is the amino acid M or K; X₈ is the amino acid Q or A; X₉ is the amino acid A or V; X₁₀ is the amino acid W or A; X₁₁ is the amino acid T or A; X₁₂ is the amino acid A or T; X₁₃ is the amino acid I or V; X₁₄ is the amino acid S or L; X₁₅ is the amino acid M or G; X₁₆ is the amino acid I or L; X₁₇ is the amino acid F or A; X₁₈ is the amino acid F or Y; X₁₉ is the amino acid Q or Y; X₂₀ is the amino acid M or V; X₂₁ is the amino acid V or I; X₂₂ is the amino acid S or G; X₂₃ is the amino acid M or F; X₂₄ is the amino acid V or G; X₂₅ is the amino acid S or T; X₂₆ is the amino acid P or S; X_{2 7} is the amino acid E or D; X₂₈ is the amino acid E or Y; X₂₉ is the amino acid F or G; X₃₀ is the amino acid N or S; and/or X₃₁ is the amino acid K or H; the amino acid sequence X₁VQX₂GX₃X₄X₅EX₆X₇LX₈X₉YDGSDX₁₀X₁₁KPLLMAIKGQIYDVSX₁₂X₁₃RMF (SEQ ID NO: 51), wherein: X₁ is the amino acid P or A; X₂ is the amino acid V or I; X₃ is the amino acid E or Q; X₄ is the amino acid I or L; X₅ is the amino acid S or T; X₆ is the amino acid E or Q; X₇ is the amino acid E or Q; X₈ is the amino acid K or R; X₉ is the amino acid Q or A; X₁₀ is the amino acid S or P; X₁₁ is the amino acid K or N; X₁₂ is the amino acid Q or S; and/or X₁₃ is the amino acid S or G; and the amino acid sequence LAX₁X₂SFX₃X₄X₅DX₆TGX₇IX₈GLX₉X₁₀X₁₁ELX₁₂X₁₃LQDWEYKFMX₁₄KYVKVGX₁₅X_{16 5} (SEQ ID NO: 52), in which: X₁ is the amino acid K or L; X₂ is the amino acid M or L; X₃ is the amino acid E or K; X₄ is the amino acid E or P; X₅ is the amino acid K or E; X₆ is the amino acid L or I; X₇ is the amino acid D or N; X₈ is the amino acid S or E; X₉ is the amino acid G or S; X₁₀ is the amino acid P or E; X₁₁ is the amino acid F or E; X₁₂ is the amino acid E or V; X₁₃ is the amino acid A or I; X₁₄ is the amino acid S or E; X₁₅ is the amino acid T or E; and/or X₁₆ is the amino acid V or L. In some embodiments, the CB5 further comprises the amino acid sequence X₁X₂X₃EX₄GX₅X₆X₇X₈X₉X₁₀D (SEQ ID NO: 53), in which: X₁ is the amino acid K or E; X₂ is the amino acid P or H; X₃ is the amino acid A or S; X₄ is the amino acid D or N; X₅ is the amino acid P or H; X₆ is the amino acid S or R; X₇ is the amino acid E or N; X₈ is the amino acid S or F; X₉ is the amino acid Q or E; and/or X₁₀ is the amino acid A or I.

[0067] In some embodiments, a CB5 comprises the amino acid sequence QVWETLKEAIVAYTGLSPATFFTVLALGLAVYYVISGFFGTSDYGSH (SEQ ID NO: 58) or the amino acid sequence ELYWKAMEQIAWYTGLSPTAFFTILASMIFVFQMVSSMFVSPEEFNK (SEQ ID NO: 59); the amino acid sequence PVQVGEISEEELKQYDGSDSKKPLLMAIKGQIYDVSQSRMF (SEQ ID NO: 60) or AVQIGQLTEQQLRAYDGSDPNKPLLMAIKGQIYDVSSGRMF (SEQ ID NO: 61); and the amino acid sequence LAKMSFEEKDLTGDISGLGPFELEALQDWEYKFMSKYVKVGTV (SEQ ID NO: 62) or LALLSFKPEDITGNIEGLSEEELVILQDWEYKFMEKYVKVGEL (SEQ ID NO: 63). In some embodiments, the CB5 further comprises KPAEDGPSESQAD (SEQ ID NO: 64) or EHSENGHRNFEID (SEQ ID NO: 65).

[0068] In some embodiments, a CB5 comprises the amino acid sequence ILRVSFRKYRKAIEQ (SEQ ID NO: 54); the amino acid sequence RAFRPSIRFKKSHSTVPT (SEQ ID NO: 55); the amino acid sequence KNTLYVGG (SEQ ID NO: 56); and/or the amino acid sequence DQATQKHRSFGFVTFLEKED (SEQ ID NO: 57). In some embodiments, a CB5 comprises the amino acid sequence ILRVSFRKYRKAIEQ (SEQ ID NO: 54) at residues corresponding to positions 23-37 of SEQ ID NO: 4; the amino acid sequence RAFRPSIRFKKSHSTVPT (SEQ ID NO: 55) at residues corresponding to positions 53-70 of SEQ ID NO: 4; the amino acid sequence KNTLYVGG (SEQ ID NO: 56) at residues corresponding to positions 168-175 of SEQ ID NO: 4; and/or the amino acid sequence DQATQKHRSFGFVTFLEKED (SEQ ID NO: 57) at residues corresponding to positions 203-222 of SEQ ID NO: 4. In some embodiments, a CB5 comprises the amino acid sequence ILRVSFRKYRKAIEQ (SEQ ID NO: 54); the amino acid sequence RAFRPSIRFKKSHSTVPT (SEQ ID NO: 55); the amino acid sequence KNTLYVGG (SEQ ID NO: 56); and the amino acid sequence DQATQKHRSFGFVTFLEKED (SEQ ID NO: 57).

[0069] In some embodiments, a CB5 is capable of increasing production of a mogrol precursor, mogrol, and/or a mogroside by a host cell by at least 0.01%, at least 0.05%, at least 1%, at least 5%, at least 10%, at least 15%, at least 20%, at least 25%, at least 30%, at least 35%, at least 40%, at least 45%, at least 50%, at least 55%, at least 60%, at least 65%, at least 70%, at least 75%, at least 80%, at least 85%, at least 90%, at least 95%, at least 100%, at least 150%, at least 200%, at least 250%, at least 300%, at least 350%, at least 400%, at least 450%, at least 500%, at least 550%, at least 600%, at least 650%, at least 700%, at least 750%, at least 800%, at least 850%, at least 900%, at least 950%, or at least 1000%, including all values in between relative to production of the mogrol precursor, mogrol, and/or the mogroside by a host cell that does not comprise the CB5. In some embodiments, a CB5 is capable of increasing production of a mogrol precursor, mogrol, and/or a mogroside by a host cell at most 5%, at most 10%, at most 15%, at most 20%, at most 25%, at most 30%, at most 35%, at most 40%, at most 45%, at most 50%, at most 55%, at most 60%, at most 65%, at most 70%, at most 75%, at most 80%, at most 85%, at most 90%, at most 95%, at most 100%, at most 150%, at most 200%, at most 250%, at most 300%, at most 350%, at most 400%, at most 450%, at most 500%, at most 550%, at most 600%, at most 650%, at most 700%, at most 750%, at most 800%, at most 850%, at most 900%, at most 950%, or at most 1000%, including all values in between relative to production of the mogrol precursor, mogrol, and/or the mogroside by a host cell that does not comprise the CB5. In some embodiments, a CB5 is capable of increasing production of a mogrol precursor, mogrol, and/or a mogroside by a host cell between 0.01% and 1%, between 1% and 10%, between 10% and 20%, between 10% and 50%, between 50% and 100%, between 100% and 200%, between 200% and 300%, between 300% and 400%, between 400% and 500%, between 500% and 600%, between 600% and 700%, between 700% and 800%, between 800% and 900%, between 900% and 1000%, between 1% and 50%, between 1% and 100%, between 1% and 500%, or between 1% and 1,000%, including all values in between relative to production of the mogrol precursor, mogrol, and/or the mogroside by a host cell that does not comprise the CB5.

[0070] In some embodiments, a host cell comprising a CB5 is capable of producing at least 0.01 mg/L, at least 0.05 mg/L, at least 1 mg/L, at least 5 mg/L, at least 10 mg/L, at least 15 mg/L, at least 20 mg/L, at least 25 mg/L, at least 30 mg/L, at least 35 mg/L, at least 40 mg/L, at least 45 mg/L, at least 50 mg/L, at least 55 mg/L, at least 60 mg/L, at least 65 mg/L, at least 70 mg/L, at least 75 mg/L, at least 80 mg/L, at least 85 mg/L, at least 90 mg/L, at least 95 mg/L, at least 100 mg/L, at least 150 mg/L, at least 200 mg/L, at least 250 mg/L, at least 300 mg/L, at least 350 mg/L, at least 400 mg/L, at least 450 mg/L, at least 500 mg/L, at least 550 mg/L, at least 600 mg/L, at least 650 mg/L, at least 700 mg/L, at least 750 mg/L, at least 800 mg/L, at least 850 mg/L, at least 900 mg/L, at least 950 mg/L, or at least 1000 mg/L, including all values of a mogrol precursor, mogrol, and/or a mogroside. In some embodiments, a host cell comprising a CB5 is capable of producing at most 5 mg/L, at most 10 mg/L, at most 15 mg/L, at most 20 mg/L, at most 25 mg/L, at most 30 mg/L, at most 35 mg/L, at most 40 mg/L, at most 45 mg/L, at most 50 mg/L, at most 55 mg/L, at most 60 mg/L, at most 65 mg/L, at most 70 mg/L, at most 75 mg/L, at most 80 mg/L, at most 85 mg/L, at most 90 mg/L, at most 95 mg/L, at most 100 mg/L, at most 150 mg/L, at most 200 mg/L, at most 250 mg/L, at most 300 mg/L, at most 350 mg/L, at most 400 mg/L, at most 450 mg/L, at most 500 mg/L, at most 550 mg/L, at most 600 mg/L, at most 650 mg/L, at most 700 mg/L, at most 750 mg/L, at most 800 mg/L, at most 850 mg/L, at most 900 mg/L, at most 950 mg/L, or at most 1000 mg/L of a mogrol precursor, mogrol, and/or mogroside. In some embodiments, a host cell comprising a CB5 is capable of producing between 0.01 mg/L and 1 mg/L, between 1 mg/L and 10 mg/L, between 10 mg/L and 20 mg/L, between 10 mg/L and 50 mg/L, between 50 mg/L and 100 mg/L, between 100 mg/L and 200 mg/L, between 200 mg/L and 300 mg/L, between 300 mg/L and 400 mg/L, between 400 mg/L and 500 mg/L, between 500 mg/L and 600 mg/L, between 600 mg/L and 700 mg/L, between 700 mg/L and 800 mg/L, between 800 mg/L and 900 mg/L, between 900 mg/L and 1000 mg/L, between 1 mg/L and 50 mg/L, between 1 mg/L and 100 mg/L, between 1 mg/L and 500 mg/L, or between 1 mg/L and 1,000 mg/L, including all values in between of a mogrol precursor, mogrol, and/or the mogroside. As a non-limiting example, a CB5 may be capable of increasing production of a mogrol precursor, mogrol, and/or mogroside by a host cell that comprises one or more squalene synthases, epoxidases, cytochrome P450 reductases, C11 hydroxylases, epoxide hydrolases, and/or cucurbitadienol synthases. In some instances, a CB5 is capable of increasing production of a mogrol precursor, mogrol, and/or mogroside by a host cell that comprises one or more squalene synthases, epoxidases, cytochrome P450 reductases, C11 hydroxylases, epoxide hydrolases, cucurbitadienol synthases, and/or UDP-glycosyltransferases. In some embodiments, a host cell further comprises a CB5 reductase. In some embodiments, a host cell further comprises a glucanase.

### UDP-Glycosyltransferases (UGT) Enzymes

[0071] Aspects of the present disclosure provide UDP-glycosyltransferase enzymes (UGTs), which may be useful, for example, in the production of a mogroside (e.g., mogroside I-A1 (MIA1), mogroside I-E (MIE), mogroside II-A1 (MIIA1), mogroside II-A2 (MIIA2), mogroside III-A1 (MIIIA1), mogroside II-E (MIIE), mogroside III (MIII), siamenoside I, mogroside III-E (MIIIE), mogroside IV, mogroside IVa, isomogroside IV, mogroside V, or mogroside VI).

[0072] As used in this disclosure, a “UGT” refers to an enzyme that is capable of catalyzing the addition of the glycosyl group from a UTP-sugar to a compound (e.g., mogroside or mogrol). A UGT may be a primary and/or a secondary UGT.

[0073] A “primary” UGT, or a UGT that has “primary glycosylation activity,” refers to a UGT that is capable of catalyzing the addition of a glycosyl group to a position on a compound that does not comprise a glycosyl group. For example, a primary UGT may be capable of adding a glycosyl group to the C3 and/or C24 position of an isoprenoid substrate (e.g., mogrol). See, e.g., FIG. 1C.

[0074] A “secondary” UGT, or a UGT that has “secondary glycosylation activity,” refers to a UGT that is capable of catalyzing the addition of a glycosyl group to a position on a compound that already comprises a glycosyl group. See, e.g., FIG. 1D. As a non-limiting example, a secondary UGT may add a glycosyl group to a mogroside I-A1 (MIA1), mogroside I-E (MIE), mogroside II-A1 (MIIA1), mogroside II-A2 (MIIA2), mogroside III-A1 (MIIIA1), mogroside II-E (MIIE), mogroside III (MIII), siamenoside I, mogroside III-E (MIIIE), mogroside IV, mogroside IVa, isomogroside IV, mogroside V, and/or mogroside VI.

[0075] In some embodiments, a UGT (e.g., primary or secondary UGT) of the present disclosure comprises a sequence (e.g., nucleic acid or amino acid sequence) that is at least 5%, at least 10%, at least 15%, at least 20%, at least 25%, at least 30%, at least 35%, at least 40%, at least 45%, at least 50%, at least 55%, at least 60%, at least 65%, at least 70%, at least 71%, at least 72%, at least 73%, at least 74%, at least 75%, at least 76%, at least 77%, at least 78%, at least 79%, at least 80%, at least 81%, at least 82%, at least 83%, at least 84%, at least 85%, at least 86%, at least 87%, at least 88%, at least 89%, at least 90%, at least 91%, at least 92%, at least 93%, at least 94%, at least 95%, at least 96%, at least 97%, at least 98%, at least 99%, or 100% identical, including all values in between, to any UGT sequence disclosed in this application or known in the art. In some embodiments, a UGT comprises a sequence that is a conservatively substituted version of SEQ ID NOs: 121.

[0076] The UGTs of the present disclosure may be capable of glycosylating mogrol or a mogroside at any of the oxygenated sites (e.g., at C3, C11, C24, and C25). In some embodiments, the UGT is capable of branching glycosylation (e.g., branching glycosylation of a mogroside at C3 or C24).

[0077] Non-limiting examples of suitable substrates for the UGTs of the present disclosure include mogrol and mogrosides (e.g., mogroside IA1 (MIA1), mogroside IE (MIE), mogroside II-A1 (MIIA1), mogroside III-A1 (MIIIA1), mogroside II-E (MIIE), mogro side III (MIII), or mogroside III-E (MIIIE), siamenoside I).

[0078] In some embodiments, the UGTs of the present disclosure are capable of producing mogroside IA1 (MIA1), mogroside IE (MIE), mogroside II-A1 (MIIA1), mogroside II-A2 (MIIA2), mogroside III-A1 (MIIIA1), mogroside II-E (MIIE), mogroside III (MIII), siamenoside I, mogroside III-E (MIIIE), mogroside IV, mogroside IVa, isomogroside IV, and/or mogroside V.

[0079] In some embodiments, the UGT is capable of catalyzing the conversion of mogrol to MIA1; mogrol to MIE1; MIA1 to MIIA1; MIE1 to MIIE; MIIA1 to MIIIA1; MIA1 to MIIE; MIIA1 to MIII; MIIIA1 to siamenoside I; MIIE to MIII; MIII to siamenoside I; MIIE to MIIE; and/or MIIIE to siamenoside I.

[0080] It should be appreciated that activity, such as specific activity, of a UGT can be measured by any means known to one of ordinary skill in the art. In some embodiments, the activity, such as specific activity, of a UGT may be determined by measuring the amount of glycosylated mogroside produced per unit enzyme per unit time. For example, the activity, such as specific activity, may be measured in mmol glycosylated mogroside target produced per gram of enzyme per hour. In some embodiments, a UGT of the present disclosure may have an activity, such as specific activity, of at least 0.1 mmol (e.g., at least 1 mmol, at least 1.5 mmol, at least 2 mmol, at least 2.5 mmol, at least 3, at least 3.5 mmol, at least 4 mmol, at least 4.5 mmol, at least 5 mmol, at least 10 mmol, including all values in between) glycosylated mogroside target produced per gram of enzyme per hour.

[0081] In some embodiments, the activity, such as specific activity, of a UGT of the present disclosure is at least 1.1 fold (e.g., at least 1.3 fold, at least 1.5 fold, at least 1.7 fold, at least 1.9 fold, at least 2 fold, at least 2.5 fold, at least 3 fold, at least 4 fold, at least 5 fold, at least 10 fold, at least 20 fold, at least 30 fold, at least 40 fold, at least 50 fold, or at least 100 fold, including all values in between) greater than that of a control UGT. In some embodiments, the control UGT is a primary UGT. In some embodiments, the control UGT is a secondary UGT. In some embodiments, the control UGT is UGT94-289-1 (a wildtype UGT sequence from the monk fruit Siraitia grosvenorii provided by SEQ ID NO: 121). In some embodiments, for a UGT that has an amino acid substitution, a control UGT is the same UGT but without the amino acid substitution.

[0082] It should be appreciated that one of ordinary skill in the art would be able to characterize a protein as a UGT enzyme based on structural and/or functional information associated with the protein. For example, a protein can be characterized as a UGT enzyme based on its function, such as the ability to produce one or more mogrosides in the presence of a mogroside precursor, such as mogrol.

[0083] A UGT enzyme can be further characterized as a primary UGT based on its function of catalyzing the addition of a glycosyl group to a position on a compound that does not comprise a glycosyl group. A UGT enzyme can be characterized as a secondary UGT based on its function of catalyzing the addition of a glycosyl group to a position on a compound that already comprises a glycosyl group. In some embodiments, a UGT enzyme can be characterized as a both primary and a secondary UGT enzyme.

[0084] In other embodiments, a protein can be characterized as a UGT enzyme based on the percent identity between the protein and a known UGT enzyme. For example, the protein may be at least 10%, 15%, 20%, 25%, 30%, 35%, 40%, 45%, 50%, 55%, 60%, 65%, 70%, 75%, 80%, 85%, 90%, 91%, 92%, 93%, 94%, 95%, 96%, 97%, 98%, 99%, or 100% identical, including all values in between, to any of the UGT sequences described in this application or the sequence of any other UGT enzyme.

[0085] In other embodiments, a protein can be characterized as a UGT enzyme based on the presence of one or more domains in the protein that are associated with UGT enzymes. For example, in certain embodiments, a protein is characterized as a UGT enzyme based on the presence of a sugar binding domain and/or a catalytic domain, characteristic of UGT enzymes known in the art. In certain embodiments, the catalytic domain binds the substrate to be glycosylated.

[0086] In other embodiments, a protein can be characterized as a UGT enzyme based on a comparison of the three-dimensional structure of the protein compared to the three-dimensional structure of a known UGT enzyme. For example, a protein could be characterized as a UGT based on the number or position of alpha helical domains, beta-sheet domains, etc. It should be appreciated that a UGT enzyme can be a synthetic protein.

[0087] Structurally, UGTs often comprise a UDPGT (Prosite: PS00375) domain and a catalytic dyad. As a non-limiting example, one of ordinary skill in the art may identify a catalytic dyad in a UGT by aligning the UGT sequence to UGT94-289-1 and identifying the two residues in the UGT that correspond to histidine 21 (H21) and aspartate 122 (D122) of UGT94-289-1.

The amino acid sequence for UGT94-289-1 is:
(SEQ ID NO: 121)
MDAQRGHTTTILMFPWLGYGHLSAFLELAKSLSRRNFHIYFCSTS
VNLDAIKPKLPSSSSSDSIQLVELCLPSSPDQLPPHLHTTNALPP
HLMPTLHQAFSMAAQHFAAILHTLAPHLLIYDSFQPWAPQLASSL
NIPAINFNTTGASVLTRMLHATHYPSSKFPISEFVLHDYWKAMYS
AAGGAVTKKDHKIGETLANCLHASCSVILINSFRELEEKYMDYLS
VLLNKKVVPVGPLVYEPNQDGEDEGYSSIKNWLDKKEPSSTVFVS
FGSEYFPSKEEMEEIAHGLEASEVHFIWVVRFPQGDNTSAIEDAL
PKGFLERVGERGMVVKGWAPQAKILKHWSTGGFVSHCGWNSVMES
MMFGVPIIGVPMHLDQPFNAGLAEEAGVGVEAKRDPDGKIQRDEV
AKLIKEVVVEKTREDVRKKAREMSEILRSKGEEKMDEMVAAISLF
LKI.
A non-limiting example of a nucleic acid
sequence encoding UGT94-289-1 is:
(SEQ ID NO: 325)
atggacgcgcaacgcggacatacgactaccatcctgatgtttccg
tggttggggtacggccaccttagtgcattcctcgaattagccaag
agcttgtcgcgtaggaactttcatatttatttctgttccacatct
gtcaatttagatgctataaaacccaaactaccatcatcttcaagt
tccgattctattcagcttgtagagttatgcttgccttcctcgcca
gaccaactacccccacacctgcatacaactaatgctctacctcca
catctaatgcctaccctgcaccaggccttttcaatggcagctcaa
cattttgcagctatattacatactttagcaccgcacttgttaatc
tatgattcgttccagccttgggcgccacaattggccagctctctt
aacattcctgctattaattttaataccacgggtgccagtgtgcta
acaagaatgttacacgcgactcattacccatcttcaaagttccca
atctccgaatttgttttacatgattattggaaagcaatgtattca
gcagctggtggtgctgttacaaaaaaggaccataaaataggagaa
accttggcaaactgtttacacgcttcttgctcggtaattctgatc
aattcattcagagagttggaagaaaaatacatggattacttgtct
gtcttactaaacaagaaagttgtgcccgtgggtccgcttgtttat
gagccaaaccaagatggcgaagacgaaggttatagttcgataaag
aattggctcgataaaaaggagccctcctcaactgtctttgtttcc
ttcgggtccgaatattttccgtccaaagaagaaatggaagaaatt
gcccatggcttggaggctagcgaggtacactttatttgggtcgtt
agattcccacaaggagacaatacttctgcaattgaagatgccctt
cctaagggttttcttgagcgagtgggcgaacgtggaatggtggtt
aagggttgggctcctcaggccaaaattttgaaacattggagcaca
ggcggtttcgtaagtcattgtggatggaatagtgttatggagagc
atgatgtttggtgtacccataataggtgttccgatgcatttagat
caaccatttaatgcagggctcgcggaagaagcaggagtaggggta
gaggctaaaagggaccctgatggtaagatacagagagatgaagtc
gctaaactgatcaaagaagtggttgtcgaaaaaacgcgcgaagat
gtcagaaagaaggctagggaaatgtctgaaattttacgttcgaaa
ggtgaggaaaagatggacgagatggttgcagccattagtctcttc
ttgaagatataa.

[0088] One of ordinary skill in the art would readily recognize how to determine for any UGT enzyme what amino acid residue corresponds to a specific amino acid residue in a reference UGT such as UGT94-289-1 (SEQ ID NO: 121) by, for example, aligning sequences and/or by comparing secondary or tertiary structures.

[0089] In certain embodiments, a UGT of the present disclosure comprises one or more structural motifs corresponding to a structural motif in wild-type UGT94-289-1 (e.g., corresponding to a structural motif that is shown in Table 1). In some embodiments, a UGT comprises structural motifs corresponding to all structural motifs in Table 1. In some embodiments, a UGT comprises a structural motif that corresponds to some but not all structural motifs shown in Table 1. In some embodiments, some structural motifs may diverge by having different lengths or different helicity. For example, a UGT of the present disclosure may comprise extended versions of loops 11, 16, 20, or a combination thereof. A UGT of the present disclosure may comprise loops that have greater helicity than their counterpart in UGT94-289-1 (e.g., loops 11, 16, 20, or a combination thereof in UGT94-289-1).

TABLE 1
Non-limiting Examples of Structural Motifs in
Reference Sequence UGT94-289-1 (SEQ ID NO: 121)

| | | | SEQ |
|---|---|---|---|
| Structural | | | ID |
| Motif | Borders | Sequence | NO |
| Loop 1 | Met1-Thr9 | MDAQRGHTT | 122 |
| Beta Sheet 1 | Thr10-Phe14 | TILMF | 123 |
| Loop 2 | Pro15-Gly18 | PWLG | 124 |
| Alpha Helix 1 | Tyr19-Arg34 | YGHLSAFLELA | 125 |
| | | KSLSR | |
| Loop3 | Arg35-Phe37 | RNF | 126 |
| Beta Sheet 2 | His38-Phe41 | HIYF | 127 |
| Loop 4 | Cys42-Thr44 | CST | 128 |
| Alpha Helix 2 | Ser45-Ala50 | SVNLDA | 129 |
| Loop 5 | Ile51-Ser61 | IKPKLPSSSSS | 130 |
| Beta Sheet 3 | Asp62-Gln65 | DSIQ | 131 |
| Loop 6 | Leu66-Leu88 | LVELCLPSSPDQLPP | 132 |
| | | HLHTTNAL | |
| Alpha Helix 3 | Pro89-Ala109 | PPHLMPTLHQAFSMA | 133 |
| | | AQHFAA | |
| Loop 7 | Ile110-His117 | ILHTLAPH | 134 |
| Beta Sheet 4 | Leu118-Asp122 | LLIYD | 135 |
| Loop 8 | Ser123-Pro126 | SFQP | 136 |
| Alpha Helix 4 | Trp127-Leu134 | WAPQLASSL | 137 |
| Loop 9 | Asn135-Pro137 | NIP | 138 |
| Beta Sheet 5 | Ala138-Asn143 | AINFN | 139 |
| Loop 10 | Thr144-Gly146 | TTG | 140 |
| Alpha Helix 5 | Ala147-His158 | ASVLTRMLHATH | 141 |
| Loop 11 | Tyr159-Tyr179 | YPSSKFPISEFV | 142 |
| | | LHDYWKAMY | |
| Alpha Helix 6 | Ser180-Gly183 | SAAG | 143 |
| Loop 12 | Gly184-Lys189 | GAVTKK | 144 |
| Alpha Helix 7 | Asp190-Ser204 | DHKIGETLANCL | 145 |
| | | HAS | |
| Loop 13 | Cys205-Ser206 | CS | 146 |
| Beta Sheet 6 | Val207-Ile210 | VILI | 147 |
| Loop 14 | Asn211-Glu217 | NSFRELE | 148 |
| Alpha Helix 8 | Glu218-Leu227 | EKYMDYLSVL | 149 |
| Loop 15 | Leu228-Asn229 | LN | 150 |
| Beta Sheet 7 | Lys230-Val232 | KKV | 151 |
| Loop 16 | Val233-Ser252 | VPVGPLVYEP | 152 |
| | | NQDGEDEGYS | |
| Alpha Helix 9 | Ser253-Lys261 | SIKNWLDKK | 153 |
| Loop 17 | Glu262-Ser265 | EPSS | 154 |
| Beta Sheet 8 | Thr266-Ser270 | TVFVS | 155 |
| Loop 18 | Phe271-Ser278 | FGSEYFPS | 156 |
| Alpha Helix 10 | Lys279-Ser292 | KEEMEEIAHGL | 157 |
| | | EAS | |
| Loop 19 | Glu293-His295 | EVH | 158 |
| Beta Sheet 9 | Phe296-Val300 | FIWVV | 159 |
| Alpha Helix 11 | Arg301-Asn307 | RFPQGDN | 160 |
| Loop 20 | Thr308-Gly318 | TSAIEDALPKG | 161 |
| Alpha Helix 12 | Phe319-Val323 | FLERV | 162 |
| Loop 21 | Gly324-Gly327 | GERG | 163 |
| Beta Sheet 10 | Met328-Lys331 | MVVK | 164 |
| Loop 22 | Gly332-Pro335 | GWAP | 165 |
| Alpha Helix 13 | Gln336-Lys341 | QAKILK | 166 |
| Loop 23 | His342-Gly346 | HWSTG | 167 |
| Beta Sheet 11 | Gly347-Ser350 | GFVS | 168 |
| Loop 24 | His351-Gly353 | HCG | 169 |
| Alpha Helix 14 | Trp354-Phe363 | WNSVMESMMF | 170 |
| Loop 25 | Gly364-Pro366 | GVP | 171 |
| Beta Sheet 12 | Ile367-Val370 | IIGV | 172 |
| Loop 26 | Pro371-Leu374 | PMHL | 173 |
| Alpha Helix 15 | Asp375-Ala386 | DQPFNAGLAEEA | 174 |
| Loop 27 | Gly387-Val388 | GV | 175 |
| Beta Sheet 13 | Gly389-Glu391 | GVE | 176 |
| Loop 28 | Ala392-Gln401 | AKRDPDGKIQ | 177 |
| Alpha Helix 16 | Arg402-Val414 | RDEVAKLIKEVVV | 178 |
| Loop 29 | Glu415 | E | 179 |
| Alpha Helix 17 | Lys416-Gly436 | KTREDVRKKAREMS | 180 |
| | | EILRSKG | |
| Loop 30 | Glu437-Met440 | EEKM | 181 |
| Alpha Helix 18 | Asp441-Leu451 | DEMVAAISLFL | 182 |
| Loop 31 | Lys452-Ile453 | KI | 183 |

[0090] In some embodiments, a UGT is a circularly permutated version of a reference UGT. In some embodiments, a UGT comprises a sequence that includes at least two motifs from Table 1 in a different order than a reference UGT. For example, if a reference UGT comprises a first motif that is located C-terminal to a second motif, the first motif may be located N-terminal to the second motif in a circularly permutated UGT.

[0091] A UGT may comprise one or more motifs selected from Loop 1, Beta Sheet 1, Loop 2, Alpha Helix 1, Loop 3, Beta Sheet 2, Loop 4, Alpha Helix 2, Loop 5, Beta Sheet 3, Loop 6, Alpha Helix 3, Loop 7, Beta Sheet 4, Loop 8, Alpha Helix 4, Loop 9, Beta Sheet 5, Loop 10, Alpha Helix 5, Loop 11, Alpha Helix 6, Loop 12, Alpha Helix 7, Loop 13, Beta Sheet 6, Loop 14, Alpha Helix 8, and Loop 15 from Table 1 located C-terminal to one or more motifs corresponding to one or more motifs selected from Beta Sheet 7, Loop 16, Alpha Helix 9, Loop 17, Beta Sheet 8, Loop 18, Alpha Helix 10, Loop 19, Beta Sheet 9, Alpha Helix 11, Loop 20, Alpha Helix 12, Loop 21, Beta Sheet 10, Loop 22, Alpha Helix 13, Loop 23, Beta Sheet 11, Loop 24, Alpha Helix 14, Loop 25, Beta Sheet 12, Loop 26, Alpha Helix 15, Loop 27, Beta Sheet 13, Loop 28, Alpha Helix 16, Loop 29, Alpha Helix 17, Loop 30, Alpha Helix 18, and Loop 31 in Table 1.

[0092] In some embodiments, the N-terminal portion of a UGT comprises a catalytic site, including a catalytic dyad, and/or a substrate-binding site. In some embodiments, the C-terminal portion of a UGT comprises a cofactor-binding site. Aspects of the disclosure include UGTs that have been circularly permutated. In some embodiments, in a circularly permutated version of a UGT, the N-terminal portion and the C-terminal portions may be reversed in whole or in part. For example, the C-terminal portion of a circularly permutated UGT may comprise a catalytic site, including a catalytic dyad, and/or a substrate-binding site, while the N-terminal portion may comprise a cofactor-binding site. In some embodiments, a circularly permutated version of a UGT comprises a heterologous polynucleotide encoding a UGT, wherein the UGT comprises: a catalytic dyad and a cofactor binding site, wherein the catalytic dyad is located C-terminal to the cofactor-binding site.

[0093] A circularly permutated UGT encompassed by the disclosure may exhibit different properties from the same UGT that has not undergone circular permutation. In some embodiments, a host cell expressing such a circularly permutated version of a UGT produces in the presence of at least one mogroside precursor at least 10%, 20%, 30%, 40%, 50%, 60%, 70%, 80%, 90%, or 100% more of one or more mogrosides relative to a host cell that comprises a heterologous polynucleotide encoding a reference UGT that is not circularly permutated, such as wild-type UGT94-289-1 (SEQ ID NO: 121). In some embodiments, a host cell expressing such a circularly permutated version of a UGT produces in the presence of at least one mogroside precursor at least 10%, 20%, 30%, 40%, 50%, 60%, 70%, 80%, 90%, or 100% less of one or more mogrosides relative to a host cell that comprises a heterologous polynucleotide encoding a reference UGT that is not circularly permutated, such as wild-type UGT94-289-1 (SEQ ID NO: 121).

### Cucurbitadienol Synthase (CDS) Enzymes

[0094] Aspects of the present disclosure provide cucurbitadienol synthase (CDS) enzymes, which may be useful, for example, in the production of a cucurbitadienol compound, such as 24-25 epoxy-cucurbitadienol or cucurbitadienol. CDSs are capable of catalyzing the formation of cucurbitadienol compounds, such as 24-25 epoxy-cucurbitadienol or cucurbitadienol from oxidosqualene (e.g., 2-3 -oxidosqualene or 2,3; 22,23 -diepoxysqualene).

[0095] In some embodiments, CDSs have a leucine at a residue corresponding to position 123 of SEQ ID NO: 256 that distinguishes them from other oxidosqualene cyclases, as discussed in Takase et al.Org. Biomol. Chem., 2015, 13, 7331-7336, which is incorporated by reference in its entirety.

[0096] CDSs of the present disclosure may comprise a sequence that is at least 5%, at least 10%, at least 15%, at least 20%, at least 25%, at least 30%, at least 35%, at least 40%, at least 45%, at least 50%, at least 55%, at least 60%, at least 65%, at least 70%, at least 71%, at least 72%, at least 73%, at least 74%, at least 75%, at least 76%, at least 77%, at least 78%, at least 79%, at least 80%, at least 81%, at least 82%, at least 83%, at least 84%, at least 85%, at least 86%, at least 87%, at least 88%, at least 89%, at least 90%, at least 91%, at least 92%, at least 93%, at least 94%, at least 95%, at least 96%, at least 97%, at least 98%, at least 99%, or 100% identical, including all values in between, to a nucleic acid or amino acid sequence in Table 6, to a sequence selected from SEQ ID NO: 184-263, 299, 308, or 319, or to any other CDS sequence disclosed in this application or known in the art. In some embodiments, a CDS comprises a sequence that is a conservatively substituted version of any one of SEQ ID NOs: 224-263 or 308.

[0097] In some embodiments a CDS enzyme corresponds to AquAgaCDS16 (SEQ ID NO: 226), CSPIO6G07180.1 (SEQ ID NO: 235), or A0A1S3CBF6 (SEQ ID NO: 232).

[0098] In some embodiments, a nucleic acid sequence encoding a CDS enzyme may be codon optimized for expression in a particular host cell, including S. cerevisiae. In some embodiments, a codon-optimized nucleic acid sequence encoding a CDS enzyme corresponds to SEQ ID NO: 186, 195 or 192.

[0099] In some embodiments, a CDS of the present disclosure is capable of using oxidosqualene (e.g., 2,3-oxidosqualene or 2,3; 22,23-diepoxysqualene) as a substrate. In some embodiments, a CDS of the present disclosure is capable of producing cucurbitadienol compounds (e.g., 24-25 epoxy-cucurbitadienol or cucurbitadienol). In some embodiments, a CDS of the present disclosure catalyzes the formation of cucurbitadienol compounds (e.g., 24-25 epoxy-cucurbitadienol or cucurbitadienol) from oxidosqualene (e.g., 2-3-oxidosqualene or 2,3; 22,23-diepoxysqualene).

[0100] It should be appreciated that activity of a CDS can be measured by any means known to one of ordinary skill in the art. In some embodiments, the activity of a CDS may be measured as the normalized peak area of cucurbitadienol produced. In some embodiments, this activity is measured in arbitrary units. In some embodiments, the activity, such as specific activity, of a CDS of the present disclosure is at least 1.1 fold (e.g., at least 1.3 fold, at least 1.5 fold, at least 1.7 fold, at least 1.9 fold, at least 2 fold, at least 2.5 fold, at least 3 fold, at least 4 fold, at least 5 fold, at least 10 fold, at least 20 fold, at least 30 fold, at least 40 fold, at least 50 fold, or at least 100 fold, including all values in between) greater than that of a control CDS.

[0101] It should be appreciated that one of ordinary skill in the art would be able to characterize a protein as a CDS enzyme based on structural and/or functional information associated with the protein. For example, in some embodiments, a protein can be characterized as a CDS enzyme based on its function, such as the ability to produce cucurbitadienol compounds (e.g., 24-25 epoxy-cucurbitadienol or cucurbitadienol) using oxidosqualene (e.g., 2,3-oxidosqualene or 2,3; 22,23-diepoxysqualene) as a substrate. In some embodiments, a protein can be characterized, at least in part, as a CDS enzyme based on the presence of a leucine residue at a position corresponding to position 123 of SEQ ID NO: 256.

[0102] In some embodiments, a host cell that comprises a heterologous polynucleotide encoding a CDS enzyme produces at least 10%, 20%, 30%, 40%, 50%, 60%, 70%, 80%, 90%, or 100% more cucurbitadienol compound relative to the same host cell that does not express the heterologous gene.

[0103] In other embodiments, a protein can be characterized as a CDS enzyme based on the percent identity between the protein and a known CDS enzyme. For example, the protein may be at least 10%, 15%, 20%, 25%, 30%, 35%, 40%, 45%, 50%, 55%, 60%, 65%, 70%, 75%, 80%, 85%, 90%, 91%, 92%, 93%, 94%, 95%, 96%, 97%, 98%, 99%, or 100% identical, including all values in between, to any of the CDS sequences described in this application or the sequence of any other CDS enzyme. In other embodiments, a protein can be characterized as a CDS enzyme based on the presence of one or more domains in the protein that are associated with CDS enzymes. For example, in certain embodiments, a protein is characterized as a CDS enzyme based on the presence of a substrate channel and/or an active-site cavity characteristic of CDS enzymes known in the art. In some embodiments, the active site cavity comprises a residue that acts a gate to this channel, helping to exclude water from the cavity. In some embodiments, the active-site comprises a residue that acts a proton donor to open the epoxide of the substrate and catalyze the cyclization process.

[0104] In other embodiments, a protein can be characterized as a CDS enzyme based on a comparison of the three-dimensional structure of the protein compared to the three-dimensional structure of a known CDS enzyme. It should be appreciated that a CDS enzyme can be a synthetic protein.

### C11 Hydroxylase Enzymes

[0105] Aspects of the present disclosure provide C11 hydroxylase enzymes, which may be useful, for example, in the production of mogrol.

[0106] A C11 hydroxylase of the present disclosure may comprise a sequence that is at least 5%, at least 10%, at least 15%, at least 20%, at least 25%, at least 30%, at least 35%, at least 40%, at least 45%, at least 50%, at least 55%, at least 60%, at least 65%, at least 70%, at least 71%, at least 72%, at least 73%, at least 74%, at least 75%, at least 76%, at least 77%, at least 78%, at least 79%, at least 80%, at least 81%, at least 82%, at least 83%, at least 84%, at least 85%, at least 86%, at least 87%, at least 88%, at least 89%, at least 90%, at least 91%, at least 92%, at least 93%, at least 94%, at least 95%, at least 96%, at least 97%, at least 98%, at least 99%, or at least 100% identical, including all values in between, with a C11 hydroxylase sequence (e.g., nucleic acid or amino acid sequence) in Tables 7 and 8, with a sequence set forth as SEQ ID NO: 264-265, 280-281, 296, 305, 314-315, 320, 321, 324, 334, or 335 or to any C11 hydroxylase sequence disclosed in this application or known in the art. In some embodiments, a C11 hydroxylase comprises a sequence that is a conservatively substituted version of any one of SEQ ID NOs: 280-281, 305, 315, and 324.

[0107] In some embodiments, a C11 hydroxylase of the present disclosure is capable of oxidizing mogrol precursors (e.g., cucurbitadienol, 11-hydroxycucurbitadienol, 24,25-dihydroxy-cucurbitadienol, and/or 24,25-epoxy-cucurbitadienol). In some embodiments, a C11 hydroxylase of the present disclosure catalyzes the formation of mogrol.

[0108] It should be appreciated that activity, such as specific activity, of a C11 hydroxylase can be determined by any means known to one of ordinary skill in the art. In some embodiments, activity (e.g., specific activity) of a C11 hydroxylase may be measured as the concentration of a mogrol precursor produced or mogrol produced per unit of enzyme per unit time. In some embodiments, a C11 hydroxylase of the present disclosure has an activity (e.g., specific activity) of at least 0.0001-0.001 μmol/min/mg, at least 0.001-0.01 μmol/min/mg, at least 0.01-0.1 μmol/min/mg, or at least 0.1-1 μmol/min/mg, including all values in between.

[0109] In some embodiments, the activity, such as specific activity, of a C11 hydroxylase is at least 1.1 fold (e.g., at least 1.3 fold, at least 1.5 fold, at least 1.7 fold, at least 1.9 fold, at least 2 fold, at least 2.5 fold, at least 3 fold, at least 4 fold, at least 5 fold, at least 10 fold, at least 20 fold, at least 30 fold, at least 40 fold, at least 50 fold, at least 100 fold, at least 1000 fold or at least 10000 fold, including all values in between) greater than that of a control C11 hydroxylase.

### Cytochrome P450 Reductase Enzymes

[0110] Aspects of the present disclosure provide cytochrome P450 reductase enzymes, which may be useful, for example, in the production of mogrol. Cytochrome P450 reductase is also referred to as NADPH:ferrihemoprotein oxidoreductase, NADPH:hemoprotein oxidoreductase, NADPH:P450 oxidoreductase, P450 reductase, POR, CPR, and CYPOR. These reductases can promote C11 hydroxylase activity by catalyzing electron transfer from NADPH to a C11 hydroxylase.

[0111] Cytochrome P450 reductases of the present disclosure may comprise a sequence that is at least 5%, at least 10%, at least 15%, at least 20%, at least 25%, at least 30%, at least 35%, at least 40%, at least 45%, at least 50%, at least 55%, at least 60%, at least 65%, at least 70%, at least 71%, at least 72%, at least73%, at least 74%, at least 75%, at least 76%, at least 77%, at least 78%, at least 79%, at least 80%, at least 81%, at least 82%, at least 83%, at least 84%, at least 85%, at least 86%, at least 87%, at least 88%, at least 89%, at least 90%, at least 91%, at least 92%, at least 93%, at least 94%, at least 95%, at least 96%, at least 97%, at least 98%, at least 99%, or at least 100% identical, including all values in between, with a cytochrome P450 reductase sequence (e.g., nucleic acid or amino acid sequence) in Tables 7 and 8, with a sequence set forth as SEQ ID NO: 266-267, 282-283, 297-298, 306-307, 323, or 333 or to any cytochrome p450 reductase disclosed in this application or known in the art. In some embodiments, a cytochrome P450 reductase comprises a sequence that is a conservatively substituted version of any one of SEQ ID NOs: 282-283 and 306-307.

[0112] In some embodiments, a cytochrome P450 reductase of the present disclosure is capable of promoting oxidation of a mogrol precursor (e.g., cucurbitadienol, 11-hydroxycucurbitadienol, 24,25-dihydroxy-cucurbitadienol, and/or 24,25-epoxy-cucurbitadienol). In some embodiments, a P450 reductase of the present disclosure catalyzes the formation of a mogrol precursor or mogrol.

[0113] It should be appreciated that activity (e.g., specific activity) of a cytochrome P450 reductase can be measured by any means known to one of ordinary skill in the art. In some embodiments, activity (e.g., specific activity) of a recombinant cytochrome P450 reductase may be measured as the concentration of a mogrol precursor produced or mogrol produced per unit enzyme per unit time in the presence of a C11 hydroxylase. In some embodiments, a cytochrome P450 reductase of the present disclosure has a activity (e.g., specific activity) of at least 0.0001-0.001 μmol/min/mg, at least 0.001-0.01 μmol/min/mg, at least 0.01-0.1 μmol/min/mg, or at least 0.1-1 μmol/min/mg, including all values in between.

[0114] In some embodiments, the activity (e.g., specific activity) of a cytochrome P450 reductase is at least 1.1 fold (e.g., at least 1.3 fold, at least 1.5 fold, at least 1.7 fold, at least 1.9 fold, at least 2 fold, at least 2.5 fold, at least 3 fold, at least 4 fold, at least 5 fold, at least 10 fold, at least 20 fold, at least 30 fold, at least 40 fold, at least 50 fold, at least 100 fold, at least 1000 fold or at least 10000 fold, including all values in between) greater than that of a control cytochrome P450 reductase.

### Epoxide Hydrolase Enzymes (EPHs)

[0115] Aspects of the present disclosure provide epoxide hydrolase enzymes (EPHs), which may be useful, for example, in the conversion of 24-25 epoxy-cucurbitadienol to 24-25 dihydroxy-cucurbitadienol or in the conversion of 11-hydroxy-24,25-epoxycucurbitadienol to mogrol. EPHs are capable of converting an epoxide into two hydroxyls.

[0116] EPHs of the present disclosure may comprise a sequence that is at least 5%, at least 10%, at least 15%, at least 20%, at least 25%, at least 30%, at least 35%, at least 40%, at least 45%, at least 50%, at least 55%, at least 60%, at least 65%, at least 70%, at least 71%, at least 72%, at least 73%, at least 74%, at least 75%, at least 76%, at least 77%, at least 78%, at least 79%, at least 80%, at least 81%, at least 82%, at least 83%, at least 84%, at least 85%, at least 86%, at least 87%, at least 88%, at least 89%, at least 90%, at least 91%, at least 92%, at least 93%, at least 94%, at least 95%, at least 96%, at least 97%, at least 98%, at least 99%, or at least 100% identical, including all values in between, with a EPH sequence (e.g., nucleic acid or amino acid sequence) in Tables 7 and 8, with a sequence set forth as SEQ ID NO: 268-276, 284-292, 300-301, 309-310, or 322, or to any EPH sequence disclosed in this application or known in the art. In some embodiments, an EPH comprises a sequence that is a conservatively substituted version of any one of SEQ ID NOs: 284-292 and 309-310.

[0117] In some embodiments, a recombinant EPH of the present disclosure is capable of promoting hydrolysis of an epoxide in a cucurbitadienol compound (e.g., hydrolysis of the epoxide in 24-25 epoxy-cucurbitadienol). In some embodiments, an EPH of the present disclosure catalyzes the formation of a mogrol precursor (e.g., 24-25 dihydroxy-cucurbitadienol).

[0118] It should be appreciated that activity (e.g., specific activity) of an EPH can be measured by any means known to one of ordinary skill in the art. In some embodiments, activity (e.g., specific activity) of an EPH may be measured as the concentration of a mogrol precursor (e.g., 24-25 dihydroxy-cucurbitadienol) or mogrol produced. In some embodiments, a recombinant EPH of the present disclosure will allow production of at least 1-100 μg/L, at least 100-1000 μg/L, at least 1-100 mg/L, at least 100-1000 mg/L, at least 1-10 g/L or at least 10-100 g/L, including all values in between.

[0119] In some embodiments, the activity (e.g., specific activity) of an EPH is at least 1.1 fold (e.g., at least 1.3 fold, at least 1.5 fold, at least 1.7 fold, at least 1.9 fold, at least 2 fold, at least 2.5 fold, at least 3 fold, at least 4 fold, at least 5 fold, at least 10 fold, at least 20 fold, at least 30 fold, at least 40 fold, at least 50 fold, or at least 100 fold, including all values in between) greater than that of a control EPH.

### Squalene Epoxidases Enzymes (SQEs)

[0120] Aspects of the present disclosure provide squalene epoxidases (SQEs), which are capable of oxidizing a squalene (e.g., squalene or 2-3-oxidosqualene) to produce a squalene epoxide (e.g., 2-3-oxidosqualene or 2-3, 22-23-diepoxysqualene). SQEs may also be referred to as squalene monooxygenases.

[0121] SQEs of the present disclosure may comprise a sequence that is at least 5%, at least 10%, at least 15%, at least 20%, at least 25%, at least 30%, at least 35%, at least 40%, at least 45%, at least 50%, at least 55%, at least 60%, at least 65%, at least 70%, at least 71%, at least 72%, at least 73%, at least 74%, at least 75%, at least 76%, at least 77%, at least 78%, at least 79%, at least 80%, at least 81%, at least 82%, at least 83%, at least 84%, at least 85%, at least 86%, at least 87%, at least 88%, at least 89%, at least 90%, at least 91%, at least 92%, at least 93%, at least 94%, at least 95%, at least 96%, at least 97%, at least 98%, at least 99%, or at least 100% identical, including all values in between, with a SQE sequence (e.g., nucleic acid or amino acid sequence) in Tables 7 and 8, with a sequence set forth as SEQ ID NO: 277-279, 293-295, 303,312, 326, or 328, or to any SQE sequence disclosed in this application or known in the art.

[0122] In some embodiments, an SQE comprises a sequence that is a conservatively substituted version of any one of SEQ ID NOs: 293-295, 312, or 328.

[0123] In some embodiments, an SQE of the present disclosure is capable of promoting formation of an epoxide in a squalene compound (e.g., epoxidation of squalene or 2,3-oxidosqualene). In some embodiments, an SQE of the present disclosure catalyzes the formation of a mogrol precursor (e.g., 2-3-oxidosqualene or 2-3, 22-23-diepoxysqualene).

[0124] Activity, such as specific activity, of a recombinant SQE may be measured as the concentration of a mogrol precursor (e.g., 2-3-oxidosqualene or 2-3, 22-23-diepoxysqualene) produced per unit of enzyme per unit of time. In some embodiments, an SQE of the present disclosure has an activity, such as specific activity, of at least 0.0000001 μmol/min/mg (e.g., at least 0.000001 μmol/min/mg, at least 0.00001 μmol/min/mg, at least 0.0001 μmol/min/mg, at least 0.001 μmol/min/mg, at least 0.01 μmol/min/mg, at least 0.1 μmol/min/mg, at least 1 μmol/min/mg, at least 10 μmol/min/mg, or at least 100 μmol/min/mg, including all values in between).

[0125] In some embodiments, the activity, such as specific activity, of a SQE is at least 1.1 fold (e.g., at least 1.3 fold, at least 1.5 fold, at least 1.7 fold, at least 1.9 fold, at least 2 fold, at least 2.5 fold, at least 3 fold, at least 4 fold, at least 5 fold, at least 10 fold, at least 20 fold, at least 30 fold, at least 40 fold, at least 50 fold, or at least 100 fold, including all values in between) greater than that of a control SQE.

### Variants

[0126] Aspects of the disclosure relate to polynucleotides encoding any of the recombinant polypeptides described, such as CB5, CDS, UGT, C11 hydroxylase, cytochrome P450 reductase, EPH, SQE, and lanosterol synthase enzymes and any proteins associated with the disclosure. Variants of polynucleotide or amino acid sequences described in this application are also encompassed by the present disclosure. A variant may share at least 5%, at least 10%, at least 15%, at least 20%, at least 25%, at least 30%, at least 35%, at least 40%, at least 45%, at least 50%, at least 55%, at least 60%, at least 65%, at least 70%, at least 71%, at least 72%, at least 73%, at least 74%, at least 75%, at least 76%, at least 77%, at least 78%, at least 79%, at least 80%, at least 81%, at least 82%, at least 83%, at least 84%, at least 85%, at least 86%, at least 87%, at least 88%, at least 89%, at least 90%, at least 91%, at least 92%, at least 93%, at least 94%, at least 95%, at least 96%, at least 97%, at least 98%, at least 99%, or 100% sequence identity with a reference sequence, including all values in between.

[0127] Unless otherwise noted, the term “sequence identity,” as known in the art, refers to a relationship between the sequences of two polypeptides or polynucleotides, as determined by sequence comparison (alignment). In some embodiments, sequence identity is determined across the entire length of a sequence, while in other embodiments, sequence identity is determined over a region of a sequence.

[0128] Identity can also refer to the degree of sequence relatedness between two sequences as determined by the number of matches between strings of two or more residues (e.g., nucleic acid or amino acid residues). Identity measures the percent of identical matches between the smaller of two or more sequences with gap alignments (if any) addressed by a particular mathematical model, algorithms, or computer program.

[0129] Identity of related polypeptides or nucleic acid sequences can be readily calculated by any of the methods known to one of ordinary skill in the art. The “percent identity” of two sequences (e.g., nucleic acid or amino acid sequences) may, for example, be determined using the algorithm of Karlin and Altschul Proc. Natl. Acad. Sci. USA 87:2264-68, 1990, modified as in Karlin and Altschul Proc. Natl. Acad. Sci. USA 90:5873-77, 1993. Such an algorithm is incorporated into the NBLAST® and XBLAST® programs (version 2.0) of Altschul et al., J. Mol. Biol. 215:403-10, 1990. BLAST® protein searches can be performed, for example, with the XBLAST program, score=50, wordlength=3 to obtain amino acid sequences homologous to the protein molecules of the invention. Where gaps exist between two sequences, Gapped BLAST® can be utilized, for example, as described in Altschul et al., Nucleic Acids Res. 25(17):3389-3402, 1997. When utilizing BLAST® and Gapped BLAST® programs, the default parameters of the respective programs (e.g., XBLAST® and NBLAST®) can be used, or the parameters can be adjusted appropriately as would be understood by one of ordinary skill in the art.

[0130] Another local alignment technique which may be used, for example, is based on the Smith-Waterman algorithm (Smith, T. F. & Waterman, M. S. (1981) “Identification of common molecular subsequences.” J. Mol. Biol. 147:195-197). A general global alignment technique which may be used, for example, is the Needleman-Wunsch algorithm (Needleman, S. B. & Wunsch, C. D. (1970) “A general method applicable to the search for similarities in the amino acid sequences of two proteins.” J. Mol. Biol. 48:443-453), which is based on dynamic programming.

[0131] More recently, a Fast Optimal Global Sequence Alignment Algorithm (FOGSAA) was developed that purportedly produces global alignment of nucleic acid and amino acid sequences faster than other optimal global alignment methods, including the Needleman-Wunsch algorithm. In some embodiments, the identity of two polypeptides is determined by aligning the two amino acid sequences, calculating the number of identical amino acids, and dividing by the length of one of the amino acid sequences. In some embodiments, the identity of two nucleic acids is determined by aligning the two nucleotide sequences and calculating the number of identical nucleotide and dividing by the length of one of the nucleic acids.

[0132] For multiple sequence alignments, computer programs including Clustal Omega (Sievers et al., Mol Syst Biol. 2011 Oct. 11; 7:539) may be used.

[0133] In preferred embodiments, a sequence, including a nucleic acid or amino acid sequence, is found to have a specified percent identity to a reference sequence, such as a sequence disclosed in this application and/or recited in the claims when sequence identity is determined using the algorithm of Karlin and Altschul Proc. Natl. Acad. Sci. USA 87:2264-68, 1990, modified as in Karlin and Altschul Proc. Natl. Acad. Sci. USA 90:5873-77, 1993 (e.g., BLAST®, NBLAST®, XBLAST® or Gapped BLAST® programs, using default parameters of the respective programs).

[0134] In some embodiments, a sequence, including a nucleic acid or amino acid sequence, is found to have a specified percent identity to a reference sequence, such as a sequence disclosed in this application and/or recited in the claims when sequence identity is determined using the Smith-Waterman algorithm (Smith, T.F. & Waterman, M.S. (1981) “Identification of common molecular subsequences.” J. Mol. Biol. 147:195-197) or the Needleman-Wunsch algorithm (Needleman, S. B. & Wunsch, C. D. (1970) “A general method applicable to the search for similarities in the amino acid sequences of two proteins.” J. Mol. Biol. 48:443-453).

[0135] In some embodiments, a sequence, including a nucleic acid or amino acid sequence, is found to have a specified percent identity to a reference sequence, such as a sequence disclosed in this application and/or recited in the claims when sequence identity is determined using a Fast Optimal Global Sequence Alignment Algorithm (FOGSAA).

[0136] In some embodiments, a sequence, including a nucleic acid or amino acid sequence, is found to have a specified percent identity to a reference sequence, such as a sequence disclosed in this application and/or recited in the claims when sequence identity is determined using Clustal Omega (Sievers et al., Mol Syst Biol. 2011 Oct. 11; 7:539).

[0137] As used in this application, a residue (such as a nucleic acid residue or an amino acid residue) in sequence “X” is referred to as corresponding to a position or residue (such as a nucleic acid residue or an amino acid residue) “Z” in a different sequence “Y” when the residue in sequence “X” is at the counterpart position of “Z” in sequence “Y” when sequences X and Y are aligned using amino acid sequence alignment tools known in the art.

[0138] Variant sequences may be homologous sequences. As used in this application, homologous sequences are sequences (e.g., nucleic acid or amino acid sequences) that share a certain percent identity (e.g., at least 5%, at least 10%, at least 15%, at least 20%, at least 25%, at least 30%, at least 35%, at least 40%, at least 45%, at least 50%, at least 55%, at least 60%, at least 65%, at least 70%, at least 71%, at least 72%, at least 73%, at least 74%, at least 75%, at least 76%, at least 77%, at least 78%, at least 79%, at least 80%, at least 81%, at least 82%, at least 83%, at least 84%, at least 85%, at least 86%, at least 87%, at least 88%, at least 89%, at least 90%, at least 91%, at least 92%, at least 93%, at least 94%, at least 95%, at least 96%, at least 97%, at least 98%, at least 99%, or 100% percent identity, including all values in between) and include but are not limited to paralogous sequences, orthologous sequences, or sequences arising from convergent evolution. Paralogous sequences arise from duplication of a gene within a genome of a species, while orthologous sequences diverge after a speciation event. Two different species may have evolved independently but may each comprise a sequence that shares a certain percent identity with a sequence from the other species as a result of convergent evolution.

[0139] In some embodiments, a polypeptide variant (e.g., CB5, CDS, UGT, C11 hydroxylase, cytochrome P450 reductase, EPH, or SQE variant or variant of any protein associated with the disclosure) comprises a domain that shares a secondary structure (e.g., alpha helix, beta sheet) with a reference polypeptide (e.g., a reference CB5, CDS, UGT, C11 hydroxylase, cytochrome P450 reductase, EPH, SQE, or any protein associated with the disclosure). In some embodiments, a polypeptide variant (e.g., CB5, CDS, UGT, C11 hydroxylase, cytochrome P450 reductase, EPH, or SQE variant or variant of any protein associated with the disclosure) shares a tertiary structure with a reference polypeptide (e.g., a reference CB5, CDS, UGT, C11 hydroxylase, cytochrome P450 reductase, EPH, SQE, or any protein associated with the disclosure). As a non-limiting example, a variant polypeptide may have low primary sequence identity (e.g., less than 80%, less than 75%, less than 70%, less than 65%, less than 60%, less than 55%, less than 50%, less than 45%, less than 40%, less than 35%, less than 30%, less than 25%, less than 20%, less than 15%, less than 10%, or less than 5% sequence identity) compared to a reference polypeptide, but share one or more secondary structures (e.g., including but not limited to loops, alpha helices, or beta sheets, or have the same tertiary structure as a reference polypeptide. For example, a loop may be located between a beta sheet and an alpha helix, between two alpha helices, or between two beta sheets. Homology modeling may be used to compare two or more tertiary structures.

[0140] Mutations can be made in a nucleotide sequence by a variety of methods known to one of ordinary skill in the art. For example, mutations can be made by PCR-directed mutation, site-directed mutagenesis according to the method of Kunkel (Kunkel, Proc. Nat. Acad. Sci. U.S.A. 82: 488-492, 1985), by chemical synthesis of a gene encoding a polypeptide, by gene editing tools, or by insertions, such as insertion of a tag (e.g., a HIS tag or a GFP tag). Mutations can include, for example, substitutions, deletions, and translocations, generated by any method known in the art. Methods for producing mutations may be found in in references such as Molecular Cloning: A Laboratory Manual, J. Sambrook, et al., eds., Fourth Edition, Cold Spring Harbor Laboratory Press, Cold Spring Harbor, New York, 2012, or Current Protocols in Molecular Biology, F. M. Ausubel, et al., eds., John Wiley & Sons, Inc., New York, 2010.

[0141] In some embodiments, methods for producing variants include circular permutation (Yu and Lutz, Trends Biotechnol. 2011 January; 29(1):18-25). In circular permutation, the linear primary sequence of a polypeptide can be circularized (e.g., by joining the N-terminal and C-terminal ends of the sequence) and the polypeptide can be severed (“broken”) at a different location. Thus, the linear primary sequence of the new polypeptide may have low sequence identity (e.g., less than 80%, less than 75%, less than 70%, less than 65%, less than 60%, less than 55%, less than 50%, less than 45%, less than 40%, less than 35%, less than 30%, less than 25%, less than 20%, less than 15%, less than 10%, less or less than 5%, including all values in between) as determined by linear sequence alignment methods (e.g., Clustal Omega or BLAST). Topological analysis of the two proteins, however, may reveal that the tertiary structure of the two polypeptides is similar or dissimilar. Without being bound by a particular theory, a variant polypeptide created through circular permutation of a reference polypeptide and with a similar tertiary structure as the reference polypeptide can share similar functional characteristics (e.g., enzymatic activity, enzyme kinetics, substrate specificity or product specificity). In some instances, circular permutation may alter the secondary structure, tertiary structure or quaternary structure and produce a protein with different functional characteristics (e.g., increased or decreased enzymatic activity, different substrate specificity, or different product specificity). See, e.g., Yu and Lutz, Trends Biotechnol. 2011 Jan;29(1):18-25.

[0142] It should be appreciated that in a protein that has undergone circular permutation, the linear amino acid sequence of the protein would differ from a reference protein that has not undergone circular permutation. However, one of ordinary skill in the art would be able to determine which residues in the protein that has undergone circular permutation correspond to residues in the reference protein that has not undergone circular permutation by, for example, aligning the sequences and detecting conserved motifs, and/or by comparing the structures or predicted structures of the proteins, e.g., by homology modeling.

[0143] In some embodiments, an algorithm that determines the percent identity between a sequence of interest and a reference sequence described in this application accounts for the presence of circular permutation between the sequences. The presence of circular permutation may be detected using any method known in the art, including, for example, RASPODOM (Weiner et al., Bioinformatics. 2005 Apr. 1; 21(7):932-7). In some embodiments, the presence of circulation permutation is corrected for (e.g., the domains in at least one sequence are rearranged) prior to calculation of the percent identity between a sequence of interest and a sequence described in this application. The claims of this application should be understood to encompass sequences for which percent identity to a reference sequence is calculated after taking into account potential circular permutation of the sequence.

[0144] Functional variants of the recombinant CB5s, CDSs, UGTs, C11 hydroxylases, cytochrome P450 reductases, EPHs, squalene epoxidases, and any other proteins disclosed in this application are also encompassed by the present disclosure. For example, functional variants may bind one or more of the same substrates (e.g., mogrol, mogroside, or precursors thereof) or produce one or more of the same products (e.g., mogrol, mogroside, or precursors thereof). Functional variants may be identified using any method known in the art. For example, the algorithm of Karlin and Altschul Proc. Natl. Acad. Sci. USA 87:2264-68, 1990 described above may be used to identify homologous proteins with known functions.

[0145] Putative functional variants may also be identified by searching for polypeptides with functionally annotated domains. Databases including Pfam (Sonnhammer et al., Proteins. 1997 July; 28(3):405-20) may be used to identify polypeptides with a particular domain. For example, among oxidosqualene cyclases, additional CDS enzymes may be identified in some instances by searching for polypeptides with a leucine residue corresponding to position 123 of SEQ ID NO: 256. This leucine residue has been implicated in determining the product specificity of the CDS enzyme; mutation of this residue can, for instance, result in cycloartenol or parkeol as a product (Takase et al., Org Biomol Chem. 2015 Jul. 13(26):7331-6).

[0146] Additional UGT enzymes may be identified, for example, by searching for polypeptides with a UDPGT domain (PROSITE accession number PS00375).

[0147] Homology modeling may also be used to identify amino acid residues that are amenable to mutation without affecting function. A non-limiting example of such a method may include use of position-specific scoring matrix (PSSM) and an energy minimization protocol. See, e.g., Stormo et al., Nucleic Acids Res. 1982 May 11; 10(9):2997-3011.

[0148] PSSM may be paired with calculation of a Rosetta energy function, which determines the difference between the wild-type and the single-point mutant. Without being bound by a particular theory, potentially stabilizing mutations are desirable for protein engineering (e.g., production of functional homologs). In some embodiments, a potentially stabilizing mutation has a ΔΔG_{calc} value of less than −0.1 (e.g., less than −0.2, less than −0.3, less than −0.35, less than −0.4, less than −0.45, less than −0.5, less than −0.55, less than −0.6, less than −0.65, less than −0.7, less than −0.75, less than −0.8, less than −0.85, less than −0.9, less than −0.95, or less than −1.0) Rosetta energy units (R.e.u.). See, e.g., Goldenzweig et al., Mol Cell. 2016 Jul. 21; 63(2):337-346. doi: 10.1016/j.molcel.2016.06.012.

[0149] In some embodiments, a CB5, CDS, UGT, C11 hydroxylase, cytochrome P450 reductase, EPH, or SQE coding sequence or coding sequence of any protein associated with the disclosure comprises a mutation at 1, 2, 3, 4, 5, 6, 7, 8, 9, 10, 11, 12, 13, 14, 15, 16, 17, 18, 19, 20, 21, 22, 23, 24, 25, 26, 27, 28, 29, 30, 31, 32, 33, 34, 35, 36, 37, 38, 39, 40, 41, 42, 43, 44, 45, 46, 47, 48, 49, 50, 51, 52, 53, 54, 55, 56, 57, 58, 59, 60, 61, 62, 63, 64, 65, 66, 67, 68, 69, 70, 71, 72, 73, 74, 75, 76, 77, 78, 79, 80, 81, 82, 83, 84, 85, 86, 87, 88, 89, 90, 91, 92, 93, 94, 95, 96, 97, 98, 99, 100 or more than 100 positions corresponding to a reference coding sequence. In some embodiments, the CB5, CDS, UGT, C11 hydroxylase, cytochrome P450 reductase, EPH, or SQE coding sequence or coding sequence of any protein associated with the disclosure comprises a mutation in 1, 2, 3, 4, 5, 6, 7, 8, 9, 10, 11, 12, 13, 14, 15, 16, 17, 18, 19, 20, 21, 22, 23, 24, 25, 26, 27, 28, 29, 30, 31, 32, 33, 34, 35, 36, 37, 38, 39, 40, 41, 42, 43, 44, 45, 46, 47, 48, 49, 50, 51, 52, 53, 54, 55, 56, 57, 58, 59, 60, 61, 62, 63, 64, 65, 66, 67, 68, 69, 70, 71, 72, 73, 74, 75, 76, 77, 78, 79, 80, 81, 82, 83, 84, 85, 86, 87, 88, 89, 90, 91, 92, 93, 94, 95, 96, 97, 98, 99, 100 or more codons of the coding sequence relative to a reference coding sequence. As will be understood by one of ordinary skill in the art, a mutation within a codon may or may not change the amino acid that is encoded by the codon due to degeneracy of the genetic code. In some embodiments, the one or more mutations in the coding sequence do not alter the amino acid sequence of the coding sequence relative to the amino acid sequence of a reference polypeptide.

[0150] In some embodiments, the one or more mutations in a recombinant CB5, CDS, UGT, C11 hydroxylase, cytochrome P450 reductase, EPH, or SQE sequence or other recombinant protein sequence associated with the disclosure alter the amino acid sequence of the polypeptide relative to the amino acid sequence of a reference polypeptide. In some embodiments, the one or more mutations alter the amino acid sequence of the recombinant polypeptide relative to the amino acid sequence of a reference polypeptide and alter (enhance or reduce) an activity of the polypeptide relative to the reference polypeptide.

[0151] The activity, including specific activity, of any of the recombinant polypeptides described in this application may be measured using methods known in the art. As a non-limiting example, a recombinant polypeptide's activity may be determined by measuring its substrate specificity, product(s) produced, the concentration of product(s) produced, or any combination thereof. As used in this application, “specific activity” of a recombinant polypeptide refers to the amount (e.g., concentration) of a particular product produced for a given amount (e.g., concentration) of the recombinant polypeptide per unit time.

[0152] The skilled artisan will also realize that mutations in a recombinant polypeptide coding sequence may result in conservative amino acid substitutions to provide functionally equivalent variants of the foregoing polypeptides, e.g., variants that retain the activities of the polypeptides. As used in this application, a “conservative amino acid substitution” or “conservatively substituted” refers to an amino acid substitution that does not alter the relative charge or size characteristics or functional activity of the protein in which the amino acid substitution is made.

[0153] In some instances, an amino acid is characterized by its R group (see, e.g., Table 2). For example, an amino acid may comprise a nonpolar aliphatic R group, a positively charged R group, a negatively charged R group, a nonpolar aromatic R group, or a polar uncharged R group. Non-limiting examples of an amino acid comprising a nonpolar aliphatic R group include alanine, glycine, valine, leucine, methionine, and isoleucine. Non-limiting examples of an amino acid comprising a positively charged R group includes lysine, arginine, and histidine. Non-limiting examples of an amino acid comprising a negatively charged R group include aspartate and glutamate. Non-limiting examples of an amino acid comprising a nonpolar, aromatic R group include phenylalanine, tyrosine, and tryptophan. Non-limiting examples of an amino acid comprising a polar uncharged R group include serine, threonine, cysteine, proline, asparagine, and glutamine.

[0154] Non-limiting examples of functionally equivalent variants of polypeptides may include conservative amino acid substitutions in the amino acid sequences of proteins disclosed in this application. Conservative substitutions of amino acids include substitutions made amongst amino acids within the following groups: (a) M, I, L, V; (b) F, Y, W; (c) K, R, H; (d) A, G; (e) S, T; (f) Q, N; and (g) E, D. Additional non-limiting examples of conservative amino acid substitutions are provided in Table 2.

[0155] In some embodiments, 1, 2, 3, 4, 5, 6, 7, 8, 9, 10, 11, 12, 13, 14, 15, 16, 17, 18, 19, 20 or more than 20 residues can be changed when preparing variant polypeptides. In some embodiments, amino acids are replaced by conservative amino acid substitutions.

TABLE 2
Non-limiting examples of conservative amino acid substitutions

| Original | | Conservative Amino |
|---|---|---|
| Residue | R Group Type | Acid Substitutions |
| Ala | nonpolar aliphatic R group | Cys, Gly, Ser |
| Arg | positively charged R group | His, Lys |
| Asn | polar uncharged R group | Asp, Gln, Glu |
| Asp | negatively charged R group | Asn, Gln, Glu |
| Cys | polar uncharged R group | Ala, Ser |
| Gln | polar uncharged R group | Asn, Asp, Glu |
| Glu | negatively charged R group | Asp, Asp, Gln |
| Gly | nonpolar aliphatic R group | Ala, Ser |
| His | positively charged R group | Arg, Tyr, Trp |
| Ile | nonpolar aliphatic R group | Leu, Met, Val |
| Leu | nonpolar aliphatic R group | Ile, Met, Val |
| Lys | positively charged R group | Arg, His |
| Met | nonpolar aliphatic R group | Ile, Leu, Phe, Val |
| Pro | polar uncharged R group | |
| Phe | nonpolar aromatic R group | Met, Trp, Tyr |
| Ser | polar uncharged R group | Ala, Gly, Thr |
| Thr | polar uncharged R group | Ala, Asn, Ser |
| Trp | nonpolar aromatic R group | His, Phe, Tyr, Met |
| Tyr | nonpolar aromatic R group | His, Phe, Trp |
| Val | nonpolar aliphatic R group | Ile, Leu, Met, Thr |

[0156] Amino acid substitutions in the amino acid sequence of a polypeptide to produce a recombinant polypeptide variant having a desired property and/or activity can be made by alteration of the coding sequence of the polypeptide. Similarly, conservative amino acid substitutions in the amino acid sequence of a polypeptide to produce functionally equivalent variants of the polypeptide typically are made by alteration of the coding sequence of the recombinant polypeptide (e.g., CB5, UGT, CDS, P450, cytochrome P450 reductase, EPH, squalene epoxidase, or any protein associated with the disclosure).

### Expression of Nucleic Acids in Host Cells

[0157] Aspects of the present disclosure relate to the recombinant expression of genes encoding proteins, functional modifications and variants thereof, as well as uses relating thereto. For example, the methods described in this application may be used to produce mogrol precursors, mogrol, and/or mogrosides.

[0158] The term “heterologous” with respect to a polynucleotide, such as a polynucleotide comprising a gene, is used interchangeably with the term “exogenous” and the term “recombinant” and refers to: a polynucleotide that has been artificially supplied to a biological system; a polynucleotide that has been modified within a biological system; or a polynucleotide whose expression or regulation has been manipulated within a biological system. A heterologous polynucleotide that is introduced into or expressed in a host cell may be a polynucleotide that comes from a different organism or species from the host cell, or may be a synthetic polynucleotide, or may be a polynucleotide that is also endogenously expressed in the same organism or species as the host cell. For example, a polynucleotide that is endogenously expressed in a host cell may be considered heterologous when it is: situated non-naturally in the host cell; expressed recombinantly in the host cell, either stably or transiently; modified within the host cell; selectively edited within the host cell; expressed in a copy number that differs from the naturally occurring copy number within the host cell; or expressed in a non-natural way within the host cell, such as by manipulating regulatory regions that control expression of the polynucleotide. In some embodiments, a heterologous polynucleotide is a polynucleotide that is endogenously expressed in a host cell but whose expression is driven by a promoter that does not naturally regulate expression of the polynucleotide. In other embodiments, a heterologous polynucleotide is a polynucleotide that is endogenously expressed in a host cell and whose expression is driven by a promoter that does naturally regulate expression of the polynucleotide, but the promoter or another regulatory region is modified. In some embodiments, the promoter is recombinantly activated or repressed. For example, gene-editing based techniques may be used to regulate expression of a polynucleotide, including an endogenous polynucleotide, from a promoter, including an endogenous promoter. See, e.g., Chavez et al., Nat Methods. 2016 July; 13(7): 563-567. A heterologous polynucleotide may comprise a wild-type sequence or a mutant sequence as compared with a reference polynucleotide sequence.

[0159] A nucleic acid encoding any of the recombinant polypeptides, such as CB5s, CDSs, UGTs, C11 hydroxylases, cytochrome P450 reductases, EPHs, SQEs, or any proteins associated with the disclosure, described in this application may be incorporated into any appropriate vector through any method known in the art. For example, the vector may be an expression vector, including but not limited to a viral vector (e.g., a lentiviral, retroviral, adenoviral, or adeno-associated viral vector), any vector suitable for transient expression, any vector suitable for constitutive expression, or any vector suitable for inducible expression (e.g., a galactose-inducible or doxycycline-inducible vector).

[0160] In some embodiments, a vector replicates autonomously in the cell. A vector can contain one or more endonuclease restriction sites that are cut by a restriction endonuclease to insert and ligate a nucleic acid containing a gene described in this application to produce a recombinant vector that is able to replicate in a cell. Vectors are typically composed of DNA, although RNA vectors are also available. Cloning vectors include, but are not limited to: plasmids, fosmids, phagemids, virus genomes and artificial chromosomes. As used in this application, the terms “expression vector” or “expression construct” refer to a nucleic acid construct, generated recombinantly or synthetically, with a series of specified nucleic acid elements that permit transcription of a particular nucleic acid in a host cell, such as a yeast cell. In some embodiments, the nucleic acid sequence of a gene described in this application is inserted into a cloning vector such that it is operably joined to regulatory sequences and, in some embodiments, expressed as an RNA transcript. In some embodiments, the vector contains one or more markers, such as a selectable marker as described in this application, to identify cells transformed or transfected with the recombinant vector. In some embodiments, the nucleic acid sequence of a gene described in this application is codon-optimized. Codon optimization may increase production of the gene product by at least 10%, at least 15%, at least 20%, at least 25%, at least 30%, at least 35%, at least 40%, at least 45%, at least 50%, at least 55%, at least 60%, at least 65%, at least 70%, at least 75%, at least 80%, at least 85%, at least 90%, at least 95%, or 100%, including all values in between) relative to a reference sequence that is not codon-optimized.

[0161] A coding sequence and a regulatory sequence are said to be “operably joined” or “operably linked” when the coding sequence and the regulatory sequence are covalently linked and the expression or transcription of the coding sequence is under the influence or control of the regulatory sequence. If the coding sequence is to be translated into a functional protein, the coding sequence and the regulatory sequence are said to be operably joined or linked if induction of a promoter in the 5′ regulatory sequence permits the coding sequence to be transcribed and if the nature of the linkage between the coding sequence and the regulatory sequence does not (1) result in the introduction of a frame-shift mutation, (2) interfere with the ability of the promoter region to direct the transcription of the coding sequence, or (3) interfere with the ability of the corresponding RNA transcript to be translated into a protein.

[0162] In some embodiments, the nucleic acid encoding any of the proteins described in this application is under the control of regulatory sequences (e.g., enhancer sequences). In some embodiments, a nucleic acid is expressed under the control of a promoter. The promoter can be a native promoter, e.g., the promoter of the gene in its endogenous context, which provides normal regulation of expression of the gene. Alternatively, a promoter can be a promoter that is different from the native promoter of the gene, e.g., the promoter is different from the promoter of the gene in its endogenous context.

[0163] In some embodiments, the promoter is a eukaryotic promoter. Non-limiting examples of eukaryotic promoters include TDH3, PGK1, PKC1, PDC1, TEF1, TEF2, RPL18B, SSA1, TDH2, PYK1,TPI1 GAL1, GAL10, GAL7, GAL3, GAL2, MET3, MET25, HXT3, HXT7, ACT1, ADH1, ADH2, CUP1-1, ENO2, and SOD1, as would be known to one of ordinary skill in the art (see, e.g., Addgene website: blog.addgene.org/plasmids-101-the-promoter-region). In some embodiments, the promoter is a prokaryotic promoter (e.g., bacteriophage or bacterial promoter). Non-limiting examples of bacteriophage promoters include Pls icon, T3, T7, SP6, and PL. Non-limiting examples of bacterial promoters include Pbad, PmgrB, Ptrc2, Plac/ara, Ptac, and Pm.

[0164] In some embodiments, the promoter is an inducible promoter. As used in this application, an “inducible promoter” is a promoter controlled by the presence or absence of a molecule. Non-limiting examples of inducible promoters include chemically-regulated promoters and physically-regulated promoters. For chemically-regulated promoters, the transcriptional activity can be regulated by one or more compounds, such as alcohol, tetracycline, galactose, a steroid, a metal, or other compounds. For physically-regulated promoters, transcriptional activity can be regulated by a phenomenon such as light or temperature. Non-limiting examples of tetracycline-regulated promoters include anhydrotetracycline (aTc)-responsive promoters and other tetracycline-responsive promoter systems (e.g., a tetracycline repressor protein (tetR), a tetracycline operator sequence (tetO) and a tetracycline transactivator fusion protein (tTA)). Non-limiting examples of steroid-regulated promoters include promoters based on the rat glucocorticoid receptor, human estrogen receptor, moth ecdysone receptors, and promoters from the steroid/retinoid/thyroid receptor superfamily. Non-limiting examples of metal-regulated promoters include promoters derived from metallothionein (proteins that bind and sequester metal ions) genes. Non-limiting examples of pathogenesis-regulated promoters include promoters induced by salicylic acid, ethylene or benzothiadiazole (BTH). Non-limiting examples of temperature/heat-inducible promoters include heat shock promoters. Non-limiting examples of light-regulated promoters include light responsive promoters from plant cells. In certain embodiments, the inducible promoter is a galactose-inducible promoter. In some embodiments, the inducible promoter is induced by one or more physiological conditions (e.g., pH, temperature, radiation, osmotic pressure, saline gradients, cell surface binding, or concentration of one or more extrinsic or intrinsic inducing agents). Non-limiting examples of an extrinsic inducer or inducing agent include amino acids and amino acid analogs, saccharides and polysaccharides, nucleic acids, protein transcriptional activators and repressors, cytokines, toxins, petroleum-based compounds, metal containing compounds, salts, ions, enzyme substrate analogs, hormones or any combination thereof.

[0165] In some embodiments, the promoter is a constitutive promoter. As used in this application, a “constitutive promoter” refers to an unregulated promoter that allows continuous transcription of a gene. Non-limiting examples of a constitutive promoter include TDH3, PGK1, PKC1, PDC1, TEF1, TEF2, RPL18B, SSA1, TDH2, PYK1,TPI1, HXT3, HXT7, ACT1, ADH1, ADH2, ENO2, and SOD1.

[0166] Other inducible promoters or constitutive promoters known to one of ordinary skill in the art are also contemplated.

[0167] Regulatory sequences needed for gene expression may vary between species or cell types, but generally include, as necessary, 5′ non-transcribed and 5′ non-translated sequences involved with the initiation of transcription and translation respectively, such as a TATA box, capping sequence, CAAT sequence, and the like. In particular, such 5′ non-transcribed regulatory sequences will include a promoter region which includes a promoter sequence for transcriptional control of the operably joined gene. Regulatory sequences may also include enhancer sequences or upstream activator sequences. Vectors may include 5′ leader or signal sequences. The regulatory sequence may also include a terminator sequence. In some embodiments, a terminator sequence marks the end of a gene in DNA during transcription. The choice and design of one or more appropriate vectors suitable for inducing expression of one or more genes described in this application in a host cell is within the ability and discretion of one of ordinary skill in the art.

[0168] Expression vectors containing the necessary elements for expression are commercially available and known to one of ordinary skill in the art (see, e.g., Sambrook et al., Molecular Cloning: A Laboratory Manual, Fourth Edition, Cold Spring Harbor Laboratory Press, 2012).

[0169] In some embodiments, introduction of a polynucleotide, such as a polynucleotide encoding a recombinant polypeptide, into a host cell results in genomic integration of the polynucleotide. In some embodiments, a host cell comprises at least 1 copy, at least 2 copies, at least 3 copies, at least 4 copies, at least 5 copies, at least 6 copies, at least 7 copies, at least 8 copies, at least 9 copies, at least 10 copies, at least 11 copies, at least 12 copies, at least 13 copies, at least 14 copies, at least 15 copies, at least 16 copies, at least 17 copies, at least 18 copies, at least 19 copies, at least 20 copies, at least 21 copies, at least 22 copies, at least 23 copies, at least 24 copies, at least 25 copies, at least 26 copies, at least 27 copies, at least 28 copies, at least 29 copies, at least 30 copies, at least 31 copies, at least 32 copies, at least 33 copies, at least 34 copies, at least 35 copies, at least 36 copies, at least 37 copies, at least 38 copies, at least 39 copies, at least 40 copies, at least 41 copies, at least 42 copies, at least 43 copies, at least 44 copies, at least 45 copies, at least 46 copies, at least 47 copies, at least 48 copies, at least 49 copies, at least 50 copies, at least 60 copies, at least 70 copies, at least 80 copies, at least 90 copies, at least 100 copies, or more, including any values in between, of a polynucleotide sequence, such as a polynucleotide sequence encoding any of the recombinant polypeptides described in this application, in its genome.

### Host Cells

[0170] Any of the proteins of the disclosure may be expressed in a host cell. As used in this application, the term “host cell” refers to a cell that can be used to express a polynucleotide, such as a polynucleotide that encodes a protein used in production of mogrol, mogrosides, and precursors thereof.

[0171] Any suitable host cell may be used to produce any of the recombinant polypeptides, including CB5s, CDSs, UGTs, C11 hydroxylases, cytochrome P450 reductases, EPHs, SQEs, and other proteins disclosed in this application, including eukaryotic cells or prokaryotic cells. Suitable host cells include, but are not limited to, fungal cells (e.g., yeast cells), bacterial cells (e.g., E. coli cells), algal cells, plant cells, insect cells, and animal cells, including mammalian cells.

[0172] Suitable yeast host cells include, but are not limited to, Candida, Escherichia, Hansenula, Saccharomyces (e.g., S. cerevisiae), Schizosaccharomyces, Pichia, Kluyveromyces (e.g., K. lactis), and Yarrowia (e.g., Y. lipolytica). In some embodiments, the yeast cell is Hansenula polymorpha, Saccharomyces cerevisiae, Saccharomyces carlsbergensis, Saccharomyces diastaticus, Saccharomyces norbensis, Saccharomyces kluyveri, Schizosaccharomyces pombe, Pichia finlandica, Pichia trehalophila, Pichia kodamae, Pichia membranaefaciens, Pichia opuntiae, Pichia thermotolerans, Pichia salictaria, Pichia quercuum, Pichia pijperi, Pichia stipitis, Pichia methanolica, Pichia angusta, Komagataella phaffii, Komagataella pastoris, Kluyveromyces lactis, Candida albicans, or Yarrowia lipolytica.

[0173] In some embodiments, the yeast strain is an industrial polyploid yeast strain. Other non-limiting examples of fungal cells include cells obtained from Aspergillus spp., Penicillium spp., Fusarium spp., Rhizopus spp., Acremonium spp., Neurospora spp., Sordaria spp., Magnaporthe spp., Allomyces spp., Ustilago spp., Botrytis spp., and Trichoderma spp.

[0174] In certain embodiments, the host cell is an algal cell such as, Chlamydomonas (e.g., C. Reinhardtii) and Phormidium (P. sp. ATCC29409).

[0175] In other embodiments, the host cell is a prokaryotic cell. Suitable prokaryotic cells include gram positive, gram negative, and gram-variable bacterial cells. The host cell may be a species of, but not limited to: Agrobacterium, Alicyclobacillus, Anabaena, Anacystis, Acinetobacter, Acidothermus, Arthrobacter, Azobacter, Bacillus, Bifidobacterium, Brevibacterium, Butyrivibrio, Buchnera, Campestris, Camplyobacter, Clostridium, Corynebacterium, Chromatium, Coprococcus, Escherichia, Enterococcus, Enterobacter, Erwinia, Fusobacterium, Faecalibacterium, Francisella, Flavobacterium, Geobacillus, Haemophilus, Helicobacter, Klebsiella, Lactobacillus, Lactococcus, Ilyobacter, Micrococcus, Microbacterium, Mesorhizobium, Methylobacterium, Methylobacterium, Mycobacterium, Neisseria, Pantoea, Pseudomonas, Prochlorococcus, Rhodobacter, Rhodopseudomonas, Rhodopseudomonas, Roseburia, Rhodospirillum, Rhodococcus, Scenedesmus, Streptomyces, Streptococcus, Synecoccus, Saccharomonospora, Saccharopolyspora, Staphylococcus, Serratia, Salmonella, Shigella, Thermoanaerobacterium, Tropheryma, Tularensis, Temecula, Thermosynechococcus, Thermococcus, Ureaplasma, Xanthomonas, Xylella, Yersinia, and Zymomonas.

[0176] In some embodiments, the bacterial host cell is of the Agrobacterium species (e.g., A. radiobacter, A. rhizogenes, A. rubi), the Arthrobacter species (e.g., A. aurescens, A. citreus, A. globformis, A. hydrocarboglutamicus, A. mysorens, A. nicotianae, A. paraffineus, A. protophonniae, A. roseoparaffinus, A. sulfureus, A. ureafaciens), or the Bacillus species (e.g., B. thuringiensis, B. anthracis, B. megaterium, B. subtilis, B. lentus, B. circulans, B. pumilus, B. lautus, B. coagulans, B. brevis, B. firmus, B. alkaophius, B. licheniformis, B. clausii, B. stearothermophilus, B. halodurans and B. amyloliquefaciens. In particular embodiments, the host cell is an industrial Bacillus strain including but not limited to B. subtilis, B. pumilus, B. licheniformis, B. megaterium, B. clausii, B. stearothermophilus and B. amyloliquefaciens. In some embodiments, the host cell is an industrial Clostridium species (e.g., C. acetobutylicum, C. tetani E88, C. lituseburense, C. saccharobutylicum, C. perfringens, C. beijerinckii). In some embodiments, the host cell is an industrial Corynebacterium species (e.g., C. glutamicum, C. acetoacidophilum). In some embodiments, the host cell is an industrial Escherichia species (e.g., E. coli). In some embodiments, the host cell is an industrial Erwinia species (e.g., E. uredovora, E. carotovora, E. ananas, E. herbicola, E. punctata, E. terreus). In some embodiments, the host cell is an industrial Pantoea species (e.g., P. citrea, P. agglomerans). In some embodiments, the host cell is an industrial Pseudomonas species, (e.g., P. putida, P. aeruginosa, P. mevalonii). In some embodiments, the host cell is an industrial Streptococcus species (e.g., S. equisimiles, S. pyogenes, S. uberis). In some embodiments, the host cell is an industrial Streptomyces species (e.g., S. ambofaciens, S. achromogenes, S. avermitilis, S. coelicolor, S. aureofaciens, S. aureus, S. fungicidicus, S. griseus, S. lividans). In some embodiments, the host cell is an industrial Zymomonas species (e.g., Z mobilis, Z. lipolytica).

[0177] The present disclosure is also suitable for use with a variety of animal cell types, including mammalian cells, for example, human (including 293, HeLa, WI38, PER.C6 and Bowes melanoma cells), mouse (including 3T3, NS0, NS1, Sp2/0), hamster (CHO, BHK), monkey (COS, FRhL, Vero), and hybridoma cell lines.

[0178] The present disclosure is also suitable for use with a variety of plant cell types.

[0179] The term “cell,” as used in this application, may refer to a single cell or a population of cells, such as a population of cells belonging to the same cell line or strain. Use of the singular term “cell” should not be construed to refer explicitly to a single cell rather than a population of cells.

[0180] The host cell may comprise genetic modifications relative to a wild-type counterpart. As a non-limiting example, a host cell (e.g., S. cerevisiae or Y. lipolytica) may be modified to reduce or inactivate one or more of the following genes: hydroxymethylglutaryl-CoA (HMG-CoA) reductase (HMG1), acetyl-CoA C-acetyltransferase (acetoacetyl-CoA thiolase) (ERG10), 3-hydroxy-3-methylglutaryl-CoA (HMG-CoA) synthase (ERG13), farnesyl-diphosphate farnesyl transferase (squalene synthase) (ERGS), may be modified to overexpress squalene epoxidase (ERG1), or may be modified to downregulate lanosterol synthase (ERG7). In some embodiments, a host cell is modified to reduce or eliminate expression of one or more transporter genes, such as PDR1 or PDR3, and/or the glucanase gene EXG1.

[0181] In some embodiments, a host cell is modified to reduce or inactivate at least 1, at least 2, at least 3, at least 4, at least 5, at least 6, at least 7, at least 8, at least 9, at least 10, at least 11, at least 12, at least 13, at least 14, at least 15, at least 16, at least 17, at least 18, at least 19, or at least 20 genes.

[0182] In some embodiments, a host cell is modified to reduce or inactivate 1, 2, 3, 4, 5, 6, 7, 8, 9, 10, 11, 12, 13, 14, 15, 16, 17, 18, 19, or 20 genes.

[0183] Reduction of gene expression and/or gene inactivation may be achieved through any suitable method, including but not limited to deletion of the gene, introduction of a point mutation into the gene, truncation of the gene, introduction of an insertion into the gene, introduction of a tag or fusion into the gene, or selective editing of the gene. For example, polymerase chain reaction (PCR)-based methods may be used (see, e.g., Gardner et al., Methods Mol Biol. 2014; 1205:45-78) or well-known gene-editing techniques may be used. As a non-limiting example, genes may be deleted through gene replacement (e.g., with a marker, including a selection marker). A gene may also be truncated through the use of a transposon system (see, e.g., Poussu et al., Nucleic Acids Res. 2005; 33(12): e104).

[0184] A vector encoding any of the recombinant polypeptides described in this application may be introduced into a suitable host cell using any method known in the art. Non-limiting examples of yeast transformation protocols are described in Gietz et al., Yeast transformation can be conducted by the LiAc/SS Carrier DNA/PEG method. Methods Mol Biol. 2006; 313:107-20, which is incorporated by reference in its entirety. Host cells may be cultured under any suitable conditions as would be understood by one of ordinary skill in the art. For example, any media, temperature, and incubation conditions known in the art may be used. For host cells carrying an inducible vector, cells may be cultured with an appropriate inducible agent to promote expression.

[0185] Any of the cells disclosed in this application can be cultured in media of any type (rich or minimal) and any composition prior to, during, and/or after contact and/or integration of a nucleic acid. The conditions of the culture or culturing process can be optimized through routine experimentation as would be understood by one of ordinary skill in the art. In some embodiments, the selected media is supplemented with various components. In some embodiments, the concentration and amount of a supplemental component is optimized. In some embodiments, other aspects of the media and growth conditions (e.g., pH, temperature, etc.) are optimized through routine experimentation. In some embodiments, the frequency that the media is supplemented with one or more supplemental components, and the amount of time that the cell is cultured, is optimized.

[0186] Culturing of the cells described in this application can be performed in culture vessels known and used in the art. In some embodiments, an aerated reaction vessel (e.g., a stirred tank reactor) is used to culture the cells. In some embodiments, a bioreactor or fermenter is used to culture the cell. Thus, in some embodiments, the cells are used in fermentation. As used in this application, the terms “bioreactor” and “fermenter” are interchangeably used and refer to an enclosure, or partial enclosure, in which a biological, biochemical and/or chemical reaction takes place, involving a living organism, part of a living organism, or purified proteins. A “large-scale bioreactor” or “industrial-scale bioreactor” is a bioreactor that is used to generate a product on a commercial or quasi-commercial scale. Large scale bioreactors typically have volumes in the range of liters, hundreds of liters, thousands of liters, or more.

[0187] Non-limiting examples of bioreactors include: stirred tank fermenters, bioreactors agitated by rotating mixing devices, chemostats, bioreactors agitated by shaking devices, airlift fermenters, packed-bed reactors, fixed-bed reactors, fluidized bed bioreactors, bioreactors employing wave induced agitation, centrifugal bioreactors, roller bottles, and hollow fiber bioreactors, roller apparatuses (for example benchtop, cart-mounted, and/or automated varieties), vertically-stacked plates, spinner flasks, stirring or rocking flasks, shaken multi-well plates, MD bottles, T-flasks, Roux bottles, multiple-surface tissue culture propagators, modified fermenters, and coated beads (e.g., beads coated with serum proteins, nitrocellulose, or carboxymethyl cellulose to prevent cell attachment).

[0188] In some embodiments, the bioreactor includes a cell culture system where the cell (e.g., yeast cell) is in contact with moving liquids and/or gas bubbles. In some embodiments, the cell or cell culture is grown in suspension. In other embodiments, the cell or cell culture is attached to a solid phase carrier. Non-limiting examples of a carrier system includes microcarriers (e.g., polymer spheres, microbeads, and microdisks that can be porous or non-porous), cross-linked beads (e.g., dextran) charged with specific chemical groups (e.g., tertiary amine groups), 2D microcarriers including cells trapped in nonporous polymer fibers, 3D carriers (e.g., carrier fibers, hollow fibers, multicartridge reactors, and semi-permeable membranes that can comprising porous fibers), microcarriers having reduced ion exchange capacity, encapsulation cells, capillaries, and aggregates. In some embodiments, carriers are fabricated from materials such as dextran, gelatin, glass, or cellulose.

[0189] In some embodiments, industrial-scale processes are operated in continuous, semi-continuous or non-continuous modes. Non-limiting examples of operation modes are batch, fed batch, extended batch, repetitive batch, draw/fill, rotating-wall, spinning flask, and/or perfusion mode of operation. In some embodiments, a bioreactor allows continuous or semi-continuous replenishment of the substrate stock, for example a carbohydrate source and/or continuous or semi-continuous separation of the product, from the bioreactor.

[0190] In some embodiments, the bioreactor or fermenter includes a sensor and/or a control system to measure and/or adjust reaction parameters. Non-limiting examples of reaction parameters include biological parameters (e.g., growth rate, cell size, cell number, cell density, cell type, or cell state, etc.), chemical parameters (e.g., pH, redox-potential, concentration of reaction substrate and/or product, concentration of dissolved gases, such as oxygen concentration and CO₂ concentration, nutrient concentrations, metabolite concentrations, concentration of an oligopeptide, concentration of an amino acid, concentration of a vitamin, concentration of a hormone, concentration of an additive, serum concentration, ionic strength, concentration of an ion, relative humidity, molarity, osmolarity, concentration of other chemicals, for example buffering agents, adjuvants, or reaction by-products), physical/mechanical parameters (e.g., density, conductivity, degree of agitation, pressure, and flow rate, shear stress, shear rate, viscosity, color, turbidity, light absorption, mixing rate, conversion rate, as well as thermodynamic parameters, such as temperature, light intensity/quality, etc.). Sensors to measure the parameters described in this application are well known to one of ordinary skill in the relevant mechanical and electronic arts. Control systems to adjust the parameters in a bioreactor based on the inputs from a sensor described in this application are well known to one of ordinary skill in the art in bioreactor engineering.

[0191] In some embodiments, the method involves batch fermentation (e.g., shake flask fermentation). General considerations for batch fermentation (e.g., shake flask fermentation) include the level of oxygen and glucose. For example, batch fermentation (e.g., shake flask fermentation) may be oxygen and glucose limited, so in some embodiments, the capability of a strain to perform in a well-designed fed-batch fermentation is underestimated. Also, the final product (e.g., mogrol precursor, mogrol, mogroside precursor, or mogroside) may display some differences from the substrate (e.g., mogrol precursor, mogrol, mogroside precursor, or mogroside) in terms of solubility, toxicity, cellular accumulation and secretion and in some embodiments can have different fermentation kinetics.

[0192] The methods described in this application encompass production of the mogrol precursors (e.g., squalene, 2,3-oxidosqualene, or 24-25 epoxy-cucurbitadienol), mogrol, or mogrosides (e.g., MIA1, MIE1, MIIA1, MIIA2, MIIIA1, MIIE, MIII, siamenoside I, mogroside IV, isomogroside IV, MIIIE, and mogroside V) using a recombinant cell, cell lysate or isolated recombinant polypeptides (e.g., CB5, CDS, UGT, C11 hydroxylase, cytochrome P450 reductase, EPH, squalene epoxidase, and any proteins associated with the disclosure).

[0193] Mogrol precursors (e.g., squalene, 2,3-oxidosqualene, or 24-25 epoxy-cucurbitadienol), mogrol, mogrosides (e.g., MIA1, MIE, MIIA1, MIIA2, MIIIA1, MIIE, MIII, siamenoside I, mogroside IV, isomogroside IV, MIIIE, and mogroside V) produced by any of the recombinant cells disclosed in this application may be identified and extracted using any method known in the art. Mass spectrometry (e.g., LC-MS, GC-MS) is a non-limiting example of a method for identification and may be used to help extract a compound of interest.

[0194] The phraseology and terminology used in this application is for the purpose of description and should not be regarded as limiting. The use of terms such as “including,” “comprising,” “having,” “containing,” “involving,” and/or variations thereof in this application, is meant to encompass the items listed thereafter and equivalents thereof as well as additional items.

[0195] The present invention is further illustrated by the following Examples, which in no way should be construed as further limiting. The entire contents of all of the references (including literature references, issued patents, published patent applications, and co pending patent applications) cited throughout this application are hereby expressly incorporated by reference.

### EXAMPLES

### Example 1. Identification and Functional Characterization of CB5 Proteins That Increase Mogrol Production

[0196] This Example describes the screening of S. grosvenorii proteins in S. cerevisiae to identify proteins that promote mogrol production. The library included approximately 333 S. grosvenorii proteins whose expression correlated with expression and/or matched enzyme class of proteins involved in mogroside biosynthesis. Transcriptomic data from Xia et al. Gigascience. 2018 Jun. 1; 7(6):giy067 was used for the analysis. The entire library was screened for mogrol production to determine whether proteins whose expression correlated with expression and/or matched enzyme class of one or more proteins involved in mogroside biosynthesis could be used to increase mogrol production.

[0197] S. cerevisiae host cells were used for the screens. The host cell base strain was engineered to express one or more copies of CYP1798, CYP5491, AtCPR, CPR4497, SgCDS, EPH3, and AtEPH2, as well as to upregulate expression of ERGS and ERG1 and downregulate expression of ERG7. The base strain also had several copies of pPGK1_X_tSSA1 integrated into the genome. “X” corresponds to the F-Cph1 recognition site, which is 24 bp and has the sequence GATGCACGAGCGCAACGCTCACAA (SEQ ID NO: 46).

[0198] To test the protein library for enhanced mogrol production, an in vivo plate assay was combined with LC-MS analysis. Plasmids carrying individual genes were transformed and integrated into the chromosome of a S. cerevisiae chassis strain that produces mogrol. A strain lacking any additional plant protein was used as a negative control.

[0199] Single colonies resulting from transformation were grown as pre-cultures containing culturing media in a shaking incubator at 26° C. for 96 hours at 1000 rpm. After 48 hours, pre-cultures were transferred into production media and grown in a shaking incubator at 26° C. for 96 hours at 1000 rpm. After 96 hours, cultures were extracted with an organic solvent and product formation was tested by LC-MS analysis to evaluate mogrol and mogroside production. A Thermo Scientific Q Exactive Focus MS with a LX2 multiplexed columns setup was used. Thermo Scientific Accucore PFP columns (2.6 μm, 2.1 mm×100 mm) with 12.5 mM ammonium acetate pH 8.0 in water running buffer and acetonitrile ramp were used for separation in negative mode using full scan.

[0200] Initially, a short analytical run was performed to identify product species based on mass. Based on this screen, several proteins were identified that increased mogrol production of the parental strain (Table 3 and FIGS. 2A-2B). In particular, eleven cytochrome b5 (CB5) proteins were included in the screen (FIG. 2B). Several of these CB5 proteins were found to increase mogrol production of the parental strains, including the CB5 proteins expressed by strains 848921, 848930, 848917, 848922, and 848940.

[0201] Analysis of CB5 proteins in the screen using a motif identification software identified multiple sequence motifs that were enriched in CB5 proteins that increased mogrol production as compared to CB5 proteins that did not increase mogrol production.

[0202] The following motifs, corresponding to SEQ ID NOs: 47-49, are present in the CB5 sequences expressed in strains 848917, 848921, 848922, and 848930:

a)
the amino acid sequence
(SEQ ID NO: 47)
YTGLSP;
b) the amino acid sequence
(SEQ ID NO: 48)
KPLLMAIKGQIYDVS;
and
c) the amino acid sequence
(SEQ ID NO: 49)
LQDWEYKFM

[0203] The following motifs, corresponding to SEQ ID NOs: 50-53, are also present in the CB5 sequences expressed in strains 848917, 848921, 848922, and 848930:
[0204] a) the amino acid sequence
   [0205] X₁X₂X₃X₄X₅X₆X₇EX₈IX₉X₁₀YTGLSPX₁₁X₁₂FFTX₁₃LAX₁₄X₁₅X₁₆X₁₇VX₁₈X₁₉X₂₀X₂₁SX22X₂₃FX₂₄X₂₅X₂₆X₂₇X₂₈X₂₉X₃₀X₃₁ (SEQ ID NO: 50), in which:
      [0206] (i) X₁ is the amino acid E or Q;
      [0207] (ii) X₂ is the amino acid L or V;
      [0208] (iii) X₃ is the amino acid Y or W;
      [0209] (iv) X₄ is the amino acid W or E;
      [0210] (v) X₅ is the amino acid K or T;
      [0211] (vi) X₆ is the amino acid A or L;
      [0212] (vii) X₇ is the amino acid M or K;
      [0213] (viii) X₈ is the amino acid Q or A;
      [0214] (ix) X₉ is the amino acid A or V;
      [0215] (x) X₁₀ is the amino acid W or A;
      [0216] (xi) X₁₁ is the amino acid T or A;
      [0217] (xii) X₁₂ is the amino acid A or T;
      [0218] (xiii) X₁₃ is the amino acid I or V;
      [0219] (xiv) X₁₄ is the amino acid S or L;
      [0220] (xv) X₁₅ is the amino acid M or G;
      [0221] (xvi) X₁₆ is the amino acid I or L;
      [0222] (xvii) X₁₇ is the amino acid F or A;
      [0223] (xviii) X₁₈ is the amino acid F or Y;
      [0224] (xix) X₁₉ is the amino acid Q or Y;
      [0225] (xx) X₂₀ is the amino acid M or V;
      [0226] (xxi) X₂₁ is the amino acid V or I;
      [0227] (xxii) X₂₂ is the amino acid S or G;
      [0228] (xxiii) X₂₃ is the amino acid M or F;
      [0229] (xxiv) X₂₄ is the amino acid V or G;
      [0230] (xxv) X₂₅ is the amino acid S or T;
      [0231] (xxvi) X₂₆ is the amino acid P or S;
      [0232] (xxvii) X_{2 7} is the amino acid E or D;
      [0233] (xxviii) X₂₈ is the amino acid E or Y;
      [0234] (xxix) X₂₉ is the amino acid F or G;
      [0235] (xxx) X₃₀ is the amino acid N or S; and/or
      [0236] (xxxi) X₃₁ is the amino acid K or H;
[0237] b) the amino acid sequence
   [0238] X₁VQX₂GX₃X₄X₅EX₆X₇LX₈X₉YDGSDX₁₀X₁₁KPLLMAIKGQIYDVSX₁₂X₁₃RMF (SEQ ID NO: 51), in which:
      [0239] (i) X₁ is the amino acid P or A;
      [0240] (ii) X₂ is the amino acid V or I;
      [0241] (iii) X₃ is the amino acid E or Q;
      [0242] (iv) X₄ is the amino acid I or L;
      [0243] (v) X₅ is the amino acid S or T;
      [0244] (vi) X₆ is the amino acid E or Q;
      [0245] (vii) X₇ is the amino acid E or Q;
      [0246] (viii) X₈ is the amino acid K or R;
      [0247] (ix) X₉ is the amino acid Q or A;
      [0248] (x) X₁₀ is the amino acid S or P;
      [0249] (xi) X₁₁ is the amino acid K or N;
      [0250] (xii) X₁₂ is the amino acid Q or S; and/or
      [0251] (xiii) X₁₃ is the amino acid S or G;
[0252] c) the amino acid sequence
   [0253] LAX₁X₂SFX₃X₄X₅DX₆TGX₇IX₈GLX₉X₁₀X₁₁ELX₁₂X₁₃LQDWEYKFMX₁₄KYVKVGX₁₅X₁₆ (SEQ ID NO: 52), in which:
      [0254] (i) X₁ is the amino acid K or L;
      [0255] (ii) X₂ is the amino acid M or L;
      [0256] (iii) X₃ is the amino acid E or K;
      [0257] (iv) X₄ is the amino acid E or P;
      [0258] (v) X₅ is the amino acid K or E;
      [0259] (vi) X₆ is the amino acid L or I;
      [0260] (vii) X₇ is the amino acid D or N;
      [0261] (viii) X₈ is the amino acid S or E;
      [0262] (ix) X₉ is the amino acid G or S;
      [0263] (x) X₁₀ is the amino acid P or E;
      [0264] (xi) X₁₁ is the amino acid F or E;
      [0265] (xii) X₁₂ is the amino acid E or V;
      [0266] (xiii) X₁₃ is the amino acid A or I;
      [0267] (xiv) X₁₄ is the amino acid S or E;
      [0268] (xv) X₁₅ is the amino acid T or E; and/or
      [0269] (xvi) X₁₆ is the amino acid V or L; and
[0270] d) the amino acid sequence X₁X₂X₃EX₄GX₅X₆X₇X₈X₉X₁₀D (SEQ ID NO: 53), in which:
   [0271] (i) X₁ is the amino acid K or E;
   [0272] (ii) X₂ is the amino acid P or H;
   [0273] (iii) X₃ is the amino acid A or S;
   [0274] (iv) X₄ is the amino acid D or N;
   [0275] (v) X₅ is the amino acid P or H;
   [0276] (vi) X₆ is the amino acid S or R;
   [0277] (vii) X₇ is the amino acid E or N;
   [0278] (viii) X₈ is the amino acid S or F;
   [0279] (ix) X₉ is the amino acid Q or E; and/or
   [0280] (x) X₁₀ is the amino acid A or I.

[0281] The following motifs, corresponding to SEQ ID NOs: 58, 60, 62, and 64, are present in the CB5 sequences expressed in strains 848917 and 848921:

a)
(SEQ ID NO: 58)
QVWETLKEAIVAYTGLSPATFFTVLALGLA
VYYVISGFFGTSDYGSH;
b)
(SEQ ID NO: 60)
PVQVGEISEEELKQYDGSDSKKPLLMAIKG
QIYDVSQSRMF;
c)
(SEQ ID NO: 62)
LAKMSFEEKDLTGDISGLGPFELEALQDWE
YKFMSKYVKVGTV;
and
d)
(SEQ ID NO: 64)
KPAEDGPSESQAD

[0282] The following motifs, corresponding to SEQ ID NOs: 59, 61, 63, and 65, are present in the CB5 sequences expressed in strains 848922 and 848930:

a)
(SEQ ID NO: 59)
ELYWKAMEQIAWYTGLSPTAFFTILAS
MIFVFQMVSSMFVSPEEFNK;
b)
(SEQ ID NO: 61)
AVQIGQLTEQQLRAYDGSDPNKPLLMA
IKGQIYDVSSGRMF;
c)
(SEQ ID NO: 63)
LALLSFKPEDITGNIEGLSEEELVILQ
DWEYKFMEKYVKVGEL;
and
d)
(SEQ ID NO: 65)
EHSENGHRNFEID

[0283] The following motifs, corresponding to SEQ ID NOs: 54-57, are present in the CB5 sequence expressed in strain 848940:

a) the amino acid sequence
(SEQ ID NO: 54)
ILRVSFRKYRKAIEQ;
b) the amino acid sequence
(SEQ ID NO: 55)
RAFRPSIRFKKSHSTVPT;
c) the amino acid sequence
(SEQ ID NO: 56)
KNTLYVGG;
and/or
d) the amino acid sequence
(SEQ ID NO: 57)
DQATQKHRSFGFVTFLEKED

TABLE 3
Mogrol production by strains comprising CB5s

| | SEQ ID of | | |
|---|---|---|---|
| | CB5 expressed | Mogrol | |
| Strain | in each strain | (mg/L) | STDEV |
| Parent | N/A | 13.31 | 6.80 |
| 848921 | 1 | 52.76 | 2.91 |
| 848930 | 3 | 32.30 | 1.12 |
| 848917 | 2 | 31.29 | 19.73 |
| 848922 | 3 | 26.77 | 6.98 |
| 848940 | 4 | 16.16 | 0.29 |
| 848936 | 6 | 13.30 | 0.73 |
| 848944 | 7 | 11.28 | 2.79 |
| 849014 | 8 | 10.62 | 1.82 |
| 848923 | 5 | 9.27 | 6.22 |
| 849161 | 9 | 8.10 | 0.12 |
| 848952 | 10 | 4.58 | 1.55 |

[0284] As shown in Table 3 and in FIG. 2B, multiple CB5 proteins, which may interact with cytochrome P450 enzymes as well as cytochrome P450 reductase partners, were identified in this screen that resulted in enhanced mogrol production.

### Example 2. Increased Mogrol Production by CB5 Proteins in Y. lipolytica

[0285] This Example describes testing representative S. grosvenorii cytochrome b5 proteins identified in Example 1 in Y. lipolytica to confirm that the proteins enhance mogrol production in multiple cell types.

[0286] Three CB5 proteins identified in Example 1 (corresponding to SEQ ID NO: 1, SEQ ID NO: 2, and SEQ ID NO: 3), and a truncated version of SEQ ID NO: 1 and SEQ ID NO: 3 (corresponding to SEQ ID NO: 318), were expressed in Y. lipolytica host cells to determine whether the proteins enhanced mogrol or mogroside production in Y. lipolytica.

[0287] Two different host cell base strains were engineered to express one or more copies of CYP1798, CYP5491-T351M, AtCPR, SgCDS, and EPH3, as well as to upregulate expression of ERG1 and downregulate expression of ERG7.

[0288] To test the strains expressing the CB5 proteins for enhanced mogrol production, an in vivo plate assay was combined with LC-MS analysis. Plasmids carrying individual genes were transformed and integrated into the chromosome of Y. lipolytica parent strains that produce mogrol. Parent strains lacking any S. grosvenorii cytochrome b5 protein were used as negative controls, corresponding to strains 974137 and 1419596. Single colonies resulting from transformation were grown as pre-cultures containing culturing media in a shaking incubator at 30° C. for 96 hours at 1000 rpm. After 48 hours, pre-cultures were transferred into production media and grown in a shaking incubator at 30° C. for 96 hours at 1000 rpm. After 96 hours, cultures were extracted with an organic solvent and product formation was tested by LC-MS analysis to evaluate mogrol and mogroside production. A Thermo Scientific Q Exactive Focus MS with a LX2 multiplexed columns setup was used. Thermo Scientific Accucore PFP columns (2.6 μm, 2.1 mm×₁₀₀ mm) with 12.5 mM ammonium acetate pH 8.0 in water running buffer and acetonitrile ramp were used for separation in negative mode using full scan. Initially, a short analytical run was performed to identify product species based on mass.

[0289] The CB5 protein with a sequence corresponding to SEQ ID NO: 1 as well as the truncated form, CB5-trunc, with a sequence corresponding to SEQ ID NO: 318, expressed in strains 994375 and 934903 respectively, were observed to increase mogrol production relative to the parental strain 974137 in a first strain background (Table 4 and FIG. 3A).

[0290] In a second strain background, the CB5 proteins with a sequence corresponding to SEQ ID NO: 1, SEQ ID NO: 2, or SEQ ID NO: 3 expressed in strains 1338488, 1338490, and 1338489, respectively, were observed to increase mogrol production relative to the parental strain 1419596 (Table 4 and FIG. 3B).

[0291] Motifs corresponding to SEQ ID NOs: 47-49, 50-52, 58, 60, and 62, discussed above, are present in the CB5 sequences expressed in strains 994375, 934903, and 1338490.

TABLE 4
Mogrol production by Y. lipolytica strains comprising CB5 proteins

| | | | |
|---|---|---|---|
| | SEQ ID of CB5 | | |
| | expressed in | Mogrol | |
| Strain | each strain | (mg/L) | STDEV |

Parent 1

| | | | |
|---|---|---|---|
| Parent 1 (974137) | N/A | 0.90 | 0.03 |
| 934903 | 318 | 6.38 | 0.47 |
| 994375 | 1 | 6.88 | 0.52 |

Parent 2

| | | | |
|---|---|---|---|
| Parent 2 (1419596) | N/A | 0.20 | 0.12 |
| 1338488 | 1 | 1.24 | 0.38 |
| 1338489 | 3 | 0.37 | 0.07 |
| 1338490 | 2 | 1.81 | 0.70 |

[0292] As shown in Table 4 and in FIGS. 3A-3B, this Example shows that representative CB5 proteins identified in Example 1, and a non-naturally occurring truncated form of a CB5 protein sharing similarity to CB5 proteins identified in Example 1, were able to enhance mogrol production in Y. lipolytica host cells, confirming that this effect is not limited to S. cerevisiae cells. These data indicate that the identified CB5 proteins are able to enhance mogrol production through interactions with the heterologous pathways expressed in the host cells and that this effect is not host-dependent.

TABLE 5
Non-limiting examples of CB5 sequences

| | | SEQ | | SEQ |
|---|---|---|---|---|
| | | ID | Amino Acid | ID |
| Strain | Nucleotide Sequence | NO | Sequence | NO |
| 848921 | atggccttgcaggtgtgggaaaccttaaaagaggctatt | 11 | MALQVWETLKEAIVAYTG | 1 |
| | gtagcttatacggggctttcccctgcaacatttttcact | | LSPATFFTVLALGLAVYY | |
| | gtcctagctttgggtctggcggtttactacgttatctca | | VISGFFGTSDYGSHSRDF | |
| | ggtttctttggaacctctgattatggttctcacagtcgt | | GEQMQPLPPPVQVGEISE | |
| | gacttcggtgaacaaatgcaaccettaccaccaccagtc | | EELKQYDGSDSKKPLLMA | |
| | caagttggcgaaatatccgaagaggaattgaagcaatac | | IKGQIYDVSQSRMFYGPG | |
| | gacggtagcgattcaaagaagccattgctaatggctatc | | GPYALFAGKDASRALAKM | |
| | aaaggccaaatttacgatgtctcgcaatctaggatgttc | | SFEEKDLIGDISGLGPFE | |
| | tatggtcccggtggtccatacgccctctttgctggtaag | | LEALQDWEYKFMSKYVKV | |
| | gacgcttctcgagctttggcaaaaatgtccttcgaagaa | | GTVEKPVSETDAAPAGES | |
| | aaggacttgactggtgatatttctggtttgggccctttc | | AESTNAEVSKPAEDGPSE | |
| | gaattagaagccttacaggattgggaatacaagtttatg | | SQADKAEETVAAKVE | |
| | tccaaatacgttaaggtcggtactgttgaaaagccagtt | | | |
| | tcagagacagatgctgcccctgctggtgaatctgcggag | | | |
| | tctactaacgctgaagtctcgaaaccagcagaagacggt | | | |
| | ccttctgaatcccaagctgataaggctgaagagactgta | | | |
| | gccgctaaggttgaatag | | | |
| 848917 | atggccttgcaggtatgggagactctaaaagaagcaatt | 12 | MALQVWETLKEAIVAYTG | 2 |
| | gtcgcttataccggtcttagtccagctacgttctttaca | | LSPATFFTVLALGLAVYY | |
| | gtgttggctctgggattagccgtttactacgtcatatct | | VISGFFGTSDYGSHSRDF | |
| | ggtttctttggtacctcggactatggctcacattctcgt | | GEQMQPLPPPVQVGEISE | |
| | gatttcggggaacaaatgcaacctttgccaccgccagtt | | EELKQYDGSDSKKPLLMA | |
| | caagttggtgaaatctccgaagaggaattaaagcaatac | | IKGQIYDVSQSRMFYGPG | |
| | gatggttctgacagcaagaagccattgttgatggctatt | | GPYALFAGKDASRALAKM | |
| | aaaggtcaaatctacgacgtttcccaatctaggatgttt | | SFEEKDLTGDISGLGPFE | |
| | tacggtccaggtggtccctatgcgcttttcgctggcaag | | LEALQDWEYKFMSKYVKV | |
| | gatgcctcgcgcgctttggctaagatgagttttgaagaa | | GTVEKPVSETDAAPAGES | |
| | aaagacctgactggggatatttcaggattaggccctttc | | AESTNAEVSKPAEDGPSE | |
| | gaattggaagctctccaggattgggaatataagttcatg | | SQADKAEETVAAKQKKEK | |
| | tctaagtacgtcaaagtgggtactgttgaaaagccagtt | | KKGRRRVEGVLMEIRGEA | |
| | tccgagacagacgcagccccagctggtgaatctgccgaa | | VGGRKGEGMSREIGRGGG | |
| | agtaccaacgctgaagtctccaaacctgctgaagatggt | | GADDGNLKGGGIDHGERE | |
| | ccaagcgaatcccaagctgacaaggcggaggaaactgta | | RERERESGMS | |
| | gccgctaagcaaaaaaaggaaaaaaagaagggtagaaga | | | |
| | agagttgaaggtgtcctaatggaaatcagaggtgaagcg | | | |
| | gttggtgggagaaagggtgagggaatgtcaagagaaatc | | | |
| | ggtcggggtggtggtggtgctgatgatggtaatttgaaa | | | |
| | ggtggcggtattgaccacggtgaacgtgagcgagagaga | | | |
| | gaaagagagtctggtatgtcttag | | | |
| 848922 | atggaattgtactggaaagcaatggagcagattgcctgg | 13 | MELYWKAMEQIAWYTGLS | 3 |
| | tataccggcttatctcctacagctttctttactatactg | | PTAFFTILASMIFVFQMV | |
| | gcttcgatgatcttcgtgtttcaaatggtcagttccatg | | SSMFVSPEEFNKPPTVPV | |
| | ttcgtttctccggaagaatttaataagcccccaactgtc | | SSSNPANSNLFVNDSVAD | |
| | ccagtttcctcatctaacccagctaactctaatctattc | | ASQAVQIGQLTEQQLRAY | |
| | gtaaacgacagcgttgcggatgccagccaagctgttcaa | | DGSDPNKPLLMAIKGQIY | |
| | attggtcaattgacggaacaacagttgagggcttacgat | | DVSSGRMFYGPGSPYAMF | |
| | ggatccgacccaaacaagccattacttatggctatcaaa | | AGKDASRALALLSFKPED | |
| | ggtcaaatttatgatgtctctagtggtagaatgttctac | | ITGNIEGLSEEELVILQD | |
| | ggtcctggtagtccatacgcaatgttcgccggcaaggac | | WEYKFMEKYVKVGELVLE | |
| | gcttcaagagctttggcattgctctcttttaagccagaa | | GGGEGMNEHSENGHRNFE | |
| | gacatcaccggtaacattgaaggtttgtcagaagaggaa | | IDQEEERIEAR | |
| | ttagttatcttacaagattgggagtacaagttcatggaa | | | |
| | aagtatgttaaagtgggggaattggttctcgaaggtggt | | | |
| | ggtgaaggtatgaatgaacactctgagaacggccatcgt | | | |
| | aattttgaaatcgatcaagaagaagaaagaattgaggct | | | |
| | agatag | | | |
| 848930 | atggaactttattggaaggctatggagcaaatagcctgg | 14 | MELYWKAMEQIAWYTGLS | 3 |
| | tacacagggttatcgcctacggcattctttactattcta | | PTAFFTILASMIFVFQMV | |
| | gctagtatgattttcgtctttcagatggtgtcatctatg | | SSMFVSPEEFNKPPTVPV | |
| | ttcgttagcccagaagaatttaataaaccaccaaccgta | | SSSNPANSNLFVNDSVAD | |
| | cccgtttcctcttccaaccctgctaactctaatttgttc | | ASQAVQIGQLTEQQLRAY | |
| | gtcaacgatagcgttgctgacgcctctcaagcggtccaa | | DGSDPNKPLLMAIKGQIY | |
| | atcggtcaattgaccgaacaacaattgcgtgcttacgat | | DVSSGRMFYGPGSPYAMF | |
| | ggttccgacccaaacaagccattactgatggccatcaag | | AGKDASRALALLSFKPED | |
| | ggtcagatttatgatgtttcctctggaaggatgttctac | | ITGNIEGLSEEELVILQD | |
| | ggcccgggttcaccatacgctatgttcgccggtaaagac | | WEYKFMEKYVKVGELVLE | |
| | gcgtcgagagctctcgctttgttgtcctttaagccagaa | | GGGEGMNEHSENGHRNFE | |
| | gatatcactggtaacattgagggtttgagtgaagaagaa | | IDQEEERIEAR | |
| | ttggttatcttacaagactgggaatacaagttcatggag | | | |
| | aagtatgtgaaagtcggtgaacttgtcttggaaggtgga | | | |
| | ggtgaaggtatgaatgaacattcagagaatggccacaga | | | |
| | aactttgaaattgatcaggaagaagaaagaatcgaagct | | | |
| | agatag | | | |
| 848940 | atgaccgccactatcacagcacagcaccgtaacggctgc | 15 | MTATITAQHRNGCGPSPP | 4 |
| | ggaccttccccacccaaaaagttggacattctgagagta | | KKLDILRVSFRKYRKAIE | |
| | agtttccgaaagtatagaaaggctatagaacaaccaacg | | QPTEAISRLIAKRDRCRA | |
| | gaggctatttcgagactaattgctaaaagagatcgctgt | | FRPSIRFKKSHSTVPTTI | |
| | agagcgtttaggccatctatcagattcaagaaatcacat | | VYDLTSYLDEHPGGDDVI | |
| | tccaccgtgccaactactatcgtttacgatttgacctct | | LAATGRDATDDFEDAGHS | |
| | tacttagacgaacaccctggtggtgatgacgttatcttg | | KDARELMQKFYIGLLDTS | |
| | gccgccactggtcgtgatgctacagacgattttgaagat | | SSASPELETKQPRGYAAR | |
| | gctggtcattctaaggatgctagagaacttatgcaaaag | | VQGLTKQYWAAPVAILGI | |
| | ttctacattggtttattggacaccagctcttccgcttcc | | SLAVQKNTLYVGGLAEEV | |
| | ccagagttggaaacgaaacaaccgagaggttatgctgca | | NESILHAAFIPFGDIKDV | |
| | agagtccaagggttgactaagcaatactgggcagctcca | | KTPLDQATQKHRSFGFVT | |
| | gttgccatactcggtatttcattagccgtccaaaagaat | | FLEKEDASAAMDNMDGAE | |
| | actttgtacgtcggcggtctggctgaagaagttaacgaa | | LYGRVLTVNYALPERIKG | |
| | agtatcttgcacgctgctttcattccttttggtgacatt | | GEQGWAAQPIWADADTWF | |
| | aaagacgttaagaccccgttagaccaagctacccagaag | | ERQQQEEEMQRIQAENRA | |
| | catagatcattcgggtttgttactttcctagaaaaggaa | | AMQAAEELHRKKLAQERE | |
| | gatgcctctgcggctatggataatatggacggtgcggaa | | GEKEDEIDTKDDPMAKAE | |
| | ttgtatggtcgtgtcttgactgtaaactacgccttgcca | | AEVLRQNS | |
| | gagagaatcaagggtggagaacaaggttgggctgcgcaa | | | |
| | ccaatctgggctgatgctgatacctggttcgagagacaa | | | |
| | caacaagaagaagaaatgcagagaatacaagccgaaaac | | | |
| | cgcgccgctatgcaagctgctgaagagctacacagaaaa | | | |
| | aagcttgctcaggaaagagaaggtgaaaaagaagatgaa | | | |
| | attgataccaaagacgacccgatggccaaggcagaagct | | | |
| | gaggtcctacgacaaaatagttag | | | |
| 848923 | atggttggaaaggccatgaggagaaatagagctcataaa | 16 | MVGKAMRRNRAHKDRVEN | 5 |
| | gatcgtgtcttcaactttttgctgccagaccctaaggta | | FLLPDPKVFVFDEVAKHN | |
| | ttcgtttttgatgaggttgcaaagcacaaccacttaaga | | HLRDCWIIISGKVYDVTP | |
| | gactgctggatcataatttcaggcaaagtctatgatgtt | | FLEEHPGGDEVLLLAAEK | |
| | acaccattcttggaagaacatccgggtggtgacgaagtg | | DATDDFENVGHSLAAIEQ | |
| | cttctattagctgctgaaaaggatgcgactgacgatttt | | MEKYYVGKVDMSTVPKPI | |
| | gaaaatgtcggtcacagcttggctgccatcgaacaaatg | | DYRPPASHPATTPSAQSS | |
| | gagaagtactacgttggtaaagtcgacatgtccacggtc | | GSLIRLLQFLIPLLILGV | |
| | ccaaagccaattgactatcggccccctgcttctcatcca | | AFYLQFYGKKQQSN | |
| | gctaccaccccatctgcccagagttctggttcgttgatt | | | |
| | cgattgcttcaattcttgatcccattattgattttaggt | | | |
| | gttgctttctacttacaattttacgggaagaaacaacaa | | | |
| | tccaactag | | | |
| 848936 | atgaaggattttcaggacgagatcgcagccagtggtgct | 17 | MKDFQDEIAASGAVPAAD | 6 |
| | gtccctgctgctgaccacaaactactgcgtacagaaccc | | HKLLRTEPAECMAAWRQR | |
| | gctgaatgcatggccgcatggagacaacgcagagctttg | | RALVPHHANAAAELSASS | |
| | gtgccacatcacgccaacgctgctgccgaattgtctgct | | VVFLFVIVVFVGVVVEIF | |
| | agctcagttgttttcttgttcgttatagtagtctttgtt | | FVAHSSISDILTGCDVGD | |
| | ggcgtcgttgtcgaaattttcttcgttgcgcattcttcc | | DSDPVVDSSLSFSSSLFS | |
| | atttctgatatcttaaccggttgtgacgttggtgatgat | | SCSFSSSSAASAAAAALL | |
| | tccgacccagtagtggattcgtctttgtccttttctagc | | LHRLLLVLLRLPSRTLFS | |
| | agtcttttctcttcctgttctttttcctcatcatcggcc | | PPIRRCLSVGLGCRVLVL | |
| | gctagtgctgcggctgctgcattattgctccacaggttg | | RLERGSIRTSHRAGTSLN | |
| | ttacttgttttgttgagactaccatctcggactttgttc | | RRSCSVWNSGEMFGDGKR | |
| | tcgccacctattagaagatgtttgtccgtcggacttggt | | ISTILGTVETQAEPARFS | |
| | tgtagagtcttagttttaagattggaaagaggttctatt | | RSLSLKDFQVLLSLPKRP | |
| | cgaacttcacatagagctggtacgtctttaaatagaaga | | LPALGSSSRIMSSRVRLR | |
| | tcatgttccgtatggaactcaggggaaatgttcggtgac | | ISAARPVAGGPSLFRRQP | |
| | ggtaagcgtatcagcaccattctagggactgttgagaca | | PSVLPIEAGHRKKRKCQM | |
| | caagcagaaccagcaagattttctcgctctttgtccttg | | ELDAGMASARTWELGRRK | |
| | aaggatttccaagtcctactgagcttgcctaaaagacca | | KKKKIFRSKFENLESKMQ | |
| | ttgccagctttgggtagctcttcccgtatcatgtcttct | | DEEKRGSGWCENAIASAS | |
| | cgcgtcagactgagaataagtgcggccagaccagttgct | | PTHTQHSIDCRTSLPLFH | |
| | ggtggtccgagtctattcaggcgacaaccaccgtctgta | | AATMGGRSVYTLAEVASH | |
| | ctgccaatcgaagctggacacagaaagaaaagaaagtgc | | DNRNDCWLIIENKVYDVT | |
| | caaatggaattggacgctggtatggcctccgctagaact | | KFLEDHPGGDEVLLSAIG | |
| | tgggagttaggtagacgtaagaagaaaaagaaaattttt | | KDATNDFDDVGHSSAARA | |
| | agaagcaagttcgaaaacttggaatctaagatgcaggat | | MMDEFYVGDIDSSTIPAK | |
| | gaagaaaaaagaggtagtggttggtgtgagaatgctatc | | RKYTPPKQPLYNQDKTPE | |
| | gcctccgcttctccaacccacacccaacactcaattgac | | FIIKVLQFLVPLVCSHRP | |
| | tgccggacgtccctaccactctttcatgccgcgactatg | | RKNLTTHCGALVAQNTGL | |
| | ggcggtagatccgtttacactttggctgaagttgccagt | | EPCTGGEGAHFEQHEHQP | |
| | catgataatagaaacgattgttggttaattatagaaaac | | LARASGNQLVCRASSCLS | |
| | aaggtttatgatgttactaagttcttagaagaccatcca | | LIDPDEPVKVIKSSNIQL | |
| | ggtggcgacgaagtcttgttgtccgctatcggtaaggat | | GSYPSLEVKSASNSAIKH | |
| | gctaccaatgactttgacgatgtgggtcacagttccgct | | HSTSQKPEKEIDWNSQFF | |
| | gctagagctatgatggatgaattttacgttggtgacatc | | NWQKADYCLNNNLPELLY | |
| | gattcttctactattcccgccaagcgtaaatacacccct | | SKREKLEAICSEQAFDAI | |
| | cctaagcaaccattgtataaccaagacaaaaccccagaa | | ASMQRLTTSAHRQEGVNS | |
| | tttattataaaggtacttcaattcttggtccctctagtt | | HIAATLQHTFQGSWRRYS | |
| | tgttctcatagaccaagaaaaaatcttacaactcactgc | | QDILQLANQDYPLRTLQS | |
| | ggagcactcgtcgcgcaaaacaccggtttggaaccatgt | | FQDNQIHNIAAQHFLE | |
| | actggcggggaaggtgctcatttcgaacagcacgaacac | | | |
| | caacccttggccagagcttctggtaatcaattggtttgt | | | |
| | cgggcttcctcctgtctctctttgatcgatccagatgag | | | |
| | ccagttaaggttatcaagtcttctaacattcaactaggt | | | |
| | tcatacccctccttggaggtgaaaagtgcttcgaacagt | | | |
| | gctatcaagcaccatagtacatctcagaagcctgaaaaa | | | |
| | gaaatagattggaatagccaattcttcaactggcaaaag | | | |
| | gctgattattgtttaaacaacaatctgccagaattgtta | | | |
| | tacagcaaaagagaaaagttggaagctatttgctctgaa | | | |
| | caagcttttgacgcaattgcctccatgcaaagactaact | | | |
| | acaagcgcccaccgtcaagaaggtgttaactctcacata | | | |
| | gcggccactctacaacacacgtttcaaggttcgtggaga | | | |
| | agatactcacaagatatcttgcaattagccaaccaagac | | | |
| | tatccattgagaaccttgcaaagtttccaagacaaccaa | | | |
| | attcataatattgctgctcaacatttcctcgaatag | | | |
| 848944 | atggcctctgatccaaaggtgcaagtcttcgaagaggtt | 18 | MASDPKVQVFEEVAKHNK | 7 |
| | gctaaacacaacaagcctaaaattgtctacgacgtaacc | | PKIVYDVTPFMEDHPGGD | |
| | ccatttatggaagatcatccaggaggtgacgaagtttta | | EVLLSATGKDATNDFEDV | |
| | ctttccgcaactggtaaggatgctacaaatgacttcgaa | | GHSDSAREMMDKYYIGEI | |
| | gatgttggccactcagattcggcgagagaaatgatggac | | DPSTVPLKKIYIPTQQTQ | |
| | aagtattacatcggtgaaatagaccccagcactgtcccg | | YTPDKTPEFVIKILQILV | |
| | ctgaagaaaatttacatcccaacccagcaaactcaatat | | PILILGLAFAVRHYTKNE | |
| | acgcctgacaagactccagagtttgttataaagattttg | | | |
| | caaatcttggtcccaattttgatcttaggtttggctttc | | | |
| | gctgttcgtcattacaccaagaacgaatag | | | |
| 849014 | atgccttcaatctctacgctctactcgatacaggaggta | 19 | MPSISTLYSIQEVSQHST | 8 |
| | tctcaacatagtacaaatgatgactgctggattgtgatt | | NDDCWIVIDGKVYDLTSY | |
| | gatggcaaggtttatgacttgacttcctacctagatgaa | | LDEHPGGDDVILAATGRD | |
| | cacccgggtggagatgacgttatcttagctgccaccggt | | ATDDFEDAGHSKDARELM | |
| | cgtgatgcaaccgacgactttgaagatgctggtcactcc | | QKFYIGLLDTSSSASPEL | |
| | aaagacgctagagaattgatgcaaaagttctatatcggt | | ETKQPRGYAARVQGLTKQ | |
| | cttttagacactagctcttcagcgtcccccgaattggag | | YWAAPVAILEKTTTKKNL | |
| | actaagcaaccaagagggtacgccgctagggtccaaggt | | KELQKWRINASNGAGSSE | |
| | ctgaccaaacaatactgggccgcaccagtcgctattttg | | KHFVRRWFGGGGERVYPT | |
| | gaaaagactaccactaagaaaaacttgaaggaattgcaa | | CSLHTLRRHQRRQDSIGS | |
| | aagtggagaattaacgcctctaatggtgctggatcttcc | | SHPEAPFLRLRHFLGKED | |
| | gaaaagcatttcgttcggcgctggtttggtggtggtggt | | ASAAMDNMDGAELYGRVL | |
| | gaaagagtctatccaacatgttcactacataccttgaga | | TVNYALPERIKGGEQGWA | |
| | agacaccagcgtagacaagacagtataggtagctctcac | | AQPIWADADTWFERQQQE | |
| | ccagaggctcctttcctgagattacgtcacttcctaggc | | EEMQRIQAENRAAMQAAE | |
| | aaagaagatgcctccgcagcgatggataacatggatggt | | ELHRKKLAQEREGEKEDE | |
| | gctgaactttacggtagagttttaactgttaactacgct | | IDTKDDPMAKAEAEVLRQ | |
| | ttgccagaaagaatcaagggtggtgaacaaggatgggct | | NS | |
| | gcccaaccaatttgggctgacgctgatacatggtttgaa | | | |
| | agacaacaacaagaagaggaaatgcaaaggatccaagcc | | | |
| | gaaaacagagctgctatgcaggctgccgaagaattgcat | | | |
| | agaaaaaagttggctcaggaaagagagggtgagaaggaa | | | |
| | gatgaaattgacactaaagatgatccaatggctaaagca | | | |
| | gaagctgaagttttacgacaaaattcttag | | | |
| 849161 | atgaccgtcagagagatagttgacatttcaaacctagct | 20 | MTVREIVDISNLAESCTS | 9 |
| | gaatcctgcacttctcttttatgtcgtaggcaaaataac | | LLCRRQNNRFVHIAARFV | |
| | agattcgtgcatatcgccgcaagatttgttgttgatgaa | | VDEDVEGVWLEELLEALT | |
| | gatgtagaaggagtctggctggaagaattgttggaagct | | LVCEEGIRLSLSDASCQG | |
| | ttgacgttggtttgtgaagaaggtctaagactcagctta | | RSVLIYLREDAHERERLS | |
| | tcggacgcttcttgtcagggtagatccgtcttgatctac | | FSSVKRWRERSCEPRPPL | |
| | ttgcgagaggatgcccacgaacgcgaaagactctctttc | | SGFWRLWWQLLRFSSASP | |
| | tctagtgttaaaagatggcgtgagagaagctgtgaaccc | | SNPDIRSPPPPPSSPLNR | |
| | aggccacctttatctgggttttggagattatggtggcaa | | SVFDVTKGKSHYGVGGGY | |
| | ttgttgagattctccagtgcttctccatccaatccagac | | NHFAGRDASRAFVSGNFT | |
| | attagatcaccgcctccaccaccctcctctccactgaac | | GEGLTDSLRGLSNAEIKS | |
| | agaagcgttttcgatgtcacaaagggtaagtctcactat | | VVEWRNFYNKTYTFVGKL | |
| | ggcgtaggtggtggttacaaccattttgcgggcagagat | | VGLHYDDQGNPTKHLKGA | |
| | gctagtagagccttcgtttccggtaattttactggtgaa | | EAKAARGAQLLKKQKEEE | |
| | ggtctaaccgactctttgcgtggtttgagtaacgctgaa | | DKLPSCNSRWSQGEGGEV | |
| | attaaaagtgttgtggagtggagaaacttctacaataag | | WCDDGFPRLVQRPLEIAL | |
| | acttataccttcgtcggaaagttagttggtttgcactac | | SGKMSKRCACFREDQLAE | |
| | gacgaccaaggtaacccaacaaagcatttgaaaggtgct | | PGLEVYEAALFPKRTNDD | |
| | gaagctaaggctgccaggggtgcacaactattgaagaaa | | GAAKILPPSDPCCFSCFP | |
| | caaaaggaagaagaagataaattgccctcttgcaactcc | | SGWCAGSIRNWISKSISS | |
| | agatggtcacaaggagaaggtggtgaggtctggtgtgat | | DFNTTTLPQQFLYVRSFP | |
| | gacggttttcctcggcttgttcagcgcccattagaaatc | | EGDKNCYIIKLAQGKGYK | |
| | gccttgtccggcaagatgtctaagagatgtgcttgtttc | | YLIRASFMYGNYDGQGKA | |
| | cgtgaagaccaacttgctgaaccagggttggaagtctac | | PAFDLHMGVNKWDSVILN | |
| | gaggcagctctttttcctaagagaactaatgatgatggc | | NESSIIIKEVIHALPTSS | |
| | gctgcaaagattttgcctccatcagatccatgctgtttc | | ICICLVNTGFGSPFISAL | |
| | agctgcttcccatccggttggtgtgccggttccatacgt | | ELRLLKNATYVTDFELLA | |
| | aactggatcagcaaatctatttcttctgactttaatacc | | LHRRLDIGSTINKTVRYN | |
| | actacattgccacaacaatttctctatgtcagaagtttc | | DDDCDRIWLPFNFPNYKI | |
| | ccagaaggtgataaaaactgttacataatcaagttggcg | | VSASSTVDSGVTALMNIK | |
| | cagggtaagggatataaatacttaatccgggcttcattc | | SLYGVRKNWQGDPCMPKS | |
| | atgtacggtaactatgacggtcaaggtaaggctccagcc | | YVWHGLNCSYDSHSPNRI | |
| | ttcgacttacacatgggggttaataagtgggattcggtt | | TSLNLSSSRLVGETAAYV | |
| | attttgaacaatgaatcatctatcattattaaggaagtc | | SELTSLQYLDLSNNSLSG | |
| | atccacgctttaccaacttcttctatatgtatttgtttg | | PVPGFLSELHSLKVLDLR | |
| | gtgaataccggtttcggtagcccattcatttccgccctc | | DNTLLGSIPSELMERSTN | |
| | gaactaagattgttaaagaacgccacttacgtcaccgat | | VKEIDGSDYYSNLSLDIV | |
| | tttgaattacttgctttgcatcgtcgtttagacatcggt | | NCFMEGLEETPIFVLHLL | |
| | tccacgactaacaaaactgttagatacaatgatgacgat | | AKTRRRVTLFQSNCSNSF | |
| | tgcgacagaatctggttgcctttcaacttccctaattat | | IIAGPLSCNSSLDHEMMK | |
| | aagatagtctctgcttcttcaaccgtggatagcggogtt | | TRYYASGRLTEKSDVYSF | |
| | acggctctgatgaacattaagtctttgtacggtgttaga | | GALILEIITSRPVLKINR | |
| | aagaactggcaaggtgacccatgtatgccaaaatcctat | | ASSEKCHVGQWAMHLMKT | |
| | gtctggcacggtttgaactgttcgtatgattcgcactca | | GDIRSIVDERLRGNFDLS | |
| | ccgaacagaattacttctcttaatttgagctcgtctagg | | SAWKAVEIAMTCLSQTSI | |
| | ctggttggtgaaactgctgcttacgtcagtgaattaacc | | ERPSMKEVVMELSECLAL | |
| | tccttgcaatacttggatctaagtaacaactctttgtcg | | EKARKRKNIDSNTRSSNA | |
| | ggtcccgtgccgggttttctttccgaattacattccttg | | VSRNFSESEVTPLAR | |
| | aaggttctggatttgagagacaataccttgcttggatct | | | |
| | atcccatccgaattgatggaaagatcgacaaacgtaaaa | | | |
| | gagatcgacggttctgattactactctaatttaagcctt | | | |
| | gatattgttaattgttttatggaaggattggaagagaca | | | |
| | ccaatctttgtcttgcatcttttggcaaagactagaaga | | | |
| | agagttactttattccaatccaactgttctaattcgttc | | | |
| | attatcgcgggcccactctcttgtaactcaagcttggac | | | |
| | catgaaatgatgaagaccagatattatgcatctggcaga | | | |
| | ttaacagaaaagagtgacgtatactctttcggggctttg | | | |
| | attttggagattatcacttcaaggccagtcttgaaaatc | | | |
| | aaccgtgcttccagcgaaaaatgccacgttggtcaatgg | | | |
| | gcaatgcacctcatgaaaactggtgatatcagatcaatt | | | |
| | gttgatgagagactcagaggtaactttgacctgtcctct | | | |
| | gcttggaaggctgttgaaattgcaatgacctgtctatct | | | |
| | cagacatcaatagaaagaccctctatgaaggaagtggtc | | | |
| | atggaattatctgaatgtcttgctttggaaaaggcccgt | | | |
| | aagagaaaaaatattgattctaacactagaagctccaac | | | |
| | gctgttagtagaaacttcagtgaaagtgaagtgacgcca | | | |
| | ttggccagatag | | | |
| 848952 | atgggctctggtgagaaagtgtttacactgaaggaagtc | 21 | MGSGEKVFTLKEVAEHNN | 10 |
| | gctgaacataacaatcaaaaggactgctggctagtaatc | | QKDCWLVISGKVYDVTKF | |
| | agcggtaaggtttatgatgttaccaaattcttagacgat | | LDDHPGGDDVLLSATGKD | |
| | cacccaggtggagatgacgttttgctttcggcaactggt | | ATDDFEDVGHSDNAREMM | |
| | aaggatgcgactgacgatttcgaagacgtcggtcactcc | | DQYYVGEIDASTIPKKVA | |
| | gataacgctcgtgaaatgatggaccagtactacgtcggt | | YAPPKQPHYNQDKTSEFI | |
| | gagattgatgcttcaacgatacctaagaaagttgcctat | | IKLLQFLVPLAILGLAVA | |
| | gcccccccaaagcaaccacattacaatcaagacaaaacc | | IRFYTKQA | |
| | tccgaatttattatcaagttgttgcaattcttggttccg | | | |
| | ctcgctatcttagggttggctgttgccattagattctac | | | |
| | actaagcaagcttag | | | |
| | atggctctgcaagtctgggagactctcaaggaggccatt | 22 | MALQVWETLKEAIVAYTG | 1 |
| | gtcgcttacaccggtctgtctcccgctaccttcttcact | | LSPATFFTVLALGLAVYY | |
| | gtgctcgctcttggtttggccgtctactacgtcatttcg | | VISGFFGTSDYGSHSRDF | |
| | ggcttcttcggcacctcggactacggctctcactctcga | | GEQMQPLPPPVQVGEISE | |
| | gatttcggtgagcagatgcagcccctgcctcctcccgtc | | EELKQYDGSDSKKPLLMA | |
| | caggttggtgagatctctgaggaggagctcaagcagtac | | IKGQIYDVSQSRMFYGPG | |
| | gacggcagtgactccaagaagcctcttctcatggccatc | | GPYALFAGKDASRALAKM | |
| | aagggccagatttacgatgtcagccagagccgaatgttc | | SFEEKDLTGDISGLGPFE | |
| | tacggacccggtggcccttacgctctgtttgccggcaag | | LEALQDWEYKFMSKYVKV | |
| | gatgcttctcgagctctggccaaaatgtcatttgaagag | | GTVEKPVSETDAAPAGES | |
| | aaggacctgactggtgacatttccggactcggcccattc | | AESTNAEVSKPAEDGPSE | |
| | gagcttgaggccctccaggattgggaatacaagttcatg | | SQADKAEETVAAKVE | |
| | tccaagtacgttaaggtcggcaccgttgagaagcccgtc | | | |
| | agcgagacagacgctgctcccgccggtgagtctgctgag | | | |
| | tccaccaacgccgaggtgtccaagcccgctgaggacggt | | | |
| | ccttccgagtcccaggccgacaaggctgaggagacagtc | | | |
| | gctgccaaggttgagtaa | | | |
| | atggctctgcaagtctgggagactctcaaggaggccatt | 23 | MALQVWETLKEAIVAYTG | 2 |
| | gtcgcttacaccggtctgtctcccgctaccttcttcact | | LSPATFFTVLALGLAVYY | |
| | gtgctcgctcttggtttggccgtctactacgtcatttcg | | VISGFFGTSDYGSHSRDF | |
| | ggcttcttcggcacctcggactacggctctcactctcga | | GEQMQPLPPPVQVGEISE | |
| | gatttcggtgagcagatgcagcccctgcctcctcccgtc | | EELKQYDGSDSKKPLLMA | |
| | caggttggtgagatctctgaggaggagctcaagcagtac | | IKGQIYDVSQSRMFYGPG | |
| | gacggcagtgactccaagaagcctcttctcatggccatc | | GPYALFAGKDASRALAKM | |
| | aagggccagatttacgatgtcagccagagccgaatgttc | | SFEEKDLTGDISGLGPFE | |
| | tacggacccggtggcccttacgctctgtttgccggcaag | | LEALQDWEYKFMSKYVKV | |
| | gatgcttctcgagctctggccaaaatgtcatttgaagag | | GTVEKPVSETDAAPAGES | |
| | aaggacctgactggtgacatttccggactcggcccattc | | AESTNAEVSKPAEDGPSE | |
| | gagcttgaggccctccaggattgggaatacaagttcatg | | SQADKAEETVAAKQKKEK | |
| | tccaagtacgttaaggtcggcaccgttgagaagcccgtc | | KKGRRRVEGVLMEIRGEA | |
| | agcgagacagacgctgctcccgccggtgagtctgctgag | | VGGRKGEGMSREIGRGGG | |
| | tccaccaacgccgaggtgtccaagcccgctgaggacggt | | GADDGNLKGGGIDHGERE | |
| | ccttccgagtcccaggccgacaaggctgaggagacagtc | | RERERESGMS | |
| | gctgccaagcagaagaaggagaagaagaagggccgacga | | | |
| | cgagtcgagggtgttctcatggagatccgaggcgaggcc | | | |
| | gttggtggccgaaagggcgagggcatgtcgagggagatt | | | |
| | ggccgaggtggtggtggtgccgacgacggcaacctcaag | | | |
| | ggtggtggtatcgaccacggtgagcgagaacgagagcga | | | |
| | gaacgagagtccggcatgtcttaa | | | |
| | atggagctgtactggaaggccatggagcagatcgcctgg | 24 | MELYWKAMEQIAWYTGLS | 3 |
| | tacactggtctgtcccccaccgccttcttcaccattctg | | PTAFFTILASMIFVFQMV | |
| | gcctccatgatctttgtgttccagatggtcagctccatg | | SSMFVSPEEFNKPPTVPV | |
| | ttcgtttctcccgaggagttcaacaagcctcccaccgtc | | SSSNPANSNLFVNDSVAD | |
| | cccgtcagctcttccaaccccgccaactccaacctcttc | | ASQAVQIGQLTEQQLRAY | |
| | gtcaacgactctgtggctgatgcttcccaggccgtccag | | DGSDPNKPLLMAIKGQIY | |
| | attggtcagctcaccgagcagcagctccgtgcttatgac | | DVSSGRMFYGPGSPYAMF | |
| | ggcagtgaccccaacaagcctcttctcatggccatcaag | | AGKDASRALALLSFKPED | |
| | ggccagatctacgacgtttcttctggacgaatgttctac | | ITGNIEGLSEEELVILQD | |
| | ggaccgggctctccttacgctatgtttgccggcaaggat | | WEYKFMEKYVKVGELVLE | |
| | gcttctcgagctctggctctgctgtccttcaagcccgag | | GGGEGMNEHSENGHRNFE | |
| | gacatcaccggtaacatcgagggtttgtccgaggaggag | | IDQEEERIEAR | |
| | ctcgttatccttcaggactgggagtacaagttcatggag | | | |
| | aagtacgtcaaggttggtgagcttgtccttgagggagga | | | |
| | ggagaagggatgaacgagcactccgagaacggtcaccga | | | |
| | aactttgagattgaccaggaggaggagcgaatcgaggct | | | |
| | cgataa | | | |
| 934903 | ATGGCTCTGCAAGTCTGGGAGACTCTCAAGGAGGCC | 316 | MALQVWETLKEAIVAYT | 318 |
| | ATTGTCGCTTACACCGGTCTGTCTCCCGCTACCTTC | | GLSPATFFTVLALGLAV | |
| | TTCACTGTGCTCGCTCTTGGTTTGGCCGTCTACTAC | | YYVISGFFGTSDYGSHS | |
| | GTCATTTCGGGCTTCTTCGGCACCTCGGACTACGGC | | RDFGEQMQPLPPPVQVG | |
| | TCTCACTCTCGAGATTTCGGTGAGCAGATGCAGCCC | | EISEEELKQYDGSDSKK | |
| | CTGCCTCCTCCCGTCCAGGTTGGTGAGATCTCTGAG | | PLLMAIKGQIYDVSQSR | |
| | GAGGAGCTCAAGCAGTACGACGGCAGTGACTCCAAG | | MFYGPGGPYALFAGKDA | |
| | AAGCCTCTTCTCATGGCCATCAAGGGCCAGATTTAC | | SRALAKMSFEEKDLTGD | |
| | GATGTCAGCCAGAGCCGAATGTTCTACGGACCCGGT | | ISGLGPFELEALQDWEY | |
| | GGCCCTTACGCTCTGTTTGCCGGCAAGGATGCTTCT | | KFMSKYVKVGTVEKPVS | |
| | CGAGCTCTGGCCAAAATGTCATTTGAAGAGAAGGAC | | ETVAAKVE | |
| | CTGACTGGTGACATTTCCGGACTCGGCCCATTCGAG | | | |
| | CTTGAGGCCCTCCAGGATTGGGAATACAAGTTCATG | | | |
| | TCCAAGTACGTTAAGGTCGGCACCGTTGAGAAGCCC | | | |
| | GTCAGCGAGACAGTCGCTGCCAAGGTTGAGTAG | | | |
| 994375 | ATGGCTCTGCAAGTCTGGGAGACTCTCAAGGAGGCC | 317 | MALQVWETLKEAIVAYT | 1 |
| | ATTGTCGCTTACACCGGTCTGTCTCCCGCTACCTTC | | GLSPATFFTVLALGLAV | |
| | TTCACTGTGCTCGCTCTTGGTTTGGCCGTCTACTAC | | YYVISGFFGTSDYGSHS | |
| | GTCATTTCGGGCTTCTTCGGCACCTCGGACTACGGC | | RDFGEQMQPLPPPVQVG | |
| | TCTCACTCTCGAGATTTCGGTGAGCAGATGCAGCCC | | EISEEELKQYDGSDSKK | |
| | CTGCCTCCTCCCGTCCAGGTTGGTGAGATCTCTGAG | | PLLMAIKGQIYDVSQSR | |
| | GAGGAGCTCAAGCAGTACGACGGCAGTGACTCCAAG | | MFYGPGGPYALFAGKDA | |
| | AAGCCTCTTCTCATGGCCATCAAGGGCCAGATTTAC | | SRALAKMSFEEKDLTGD | |
| | GATGTCAGCCAGAGCCGAATGTTCTACGGACCCGGT | | ISGLGPFELEALQDWEY | |
| | GGCCCTTACGCTCTGTTTGCCGGCAAGGATGCTTCT | | KFMSKYVKVGTVEKPVS | |
| | CGAGCTCTGGCCAAAATGTCATTTGAAGAGAAGGAC | | ETDAAPAGESAESTNAE | |
| | CTGACTGGTGACATTTCCGGACTCGGCCCATTCGAG | | VSKPAEDGPSESQADKA | |
| | CTTGAGGCCCTCCAGGATTGGGAATACAAGTTCATG | | EETVAAKVE | |
| | TCCAAGTACGTTAAGGTCGGCACCGTTGAGAAGCCC | | | |
| | GTCAGCGAGACAGACGCTGCTCCCGCCGGTGAGTCT | | | |
| | GCTGAGTCCACCAACGCCGAGGTGTCCAAGCCCGCT | | | |
| | GAGGACGGTCCTTCCGAGTCCCAGGCCGACAAGGCT | | | |
| | GAGGAGACAGTCGCTGCCAAGGTTGAGTAG | | | |
| 1338488 | ATGGCTCTGCAAGTCTGGGAGACTCTCAAGGAGGCC | 317 | MALQVWETLKEAIVAYT | 1 |
| | ATTGTCGCTTACACCGGTCTGTCTCCCGCTACCTTC | | GLSPATFFTVLALGLAV | |
| | TTCACTGTGCTCGCTCTTGGTTTGGCCGTCTACTAC | | YYVISGFFGTSDYGSHS | |
| | GTCATTTCGGGCTTCTTCGGCACCTCGGACTACGGC | | RDFGEQMQPLPPPVQVG | |
| | TCTCACTCTCGAGATTTCGGTGAGCAGATGCAGCCC | | EISEEELKQYDGSDSKK | |
| | CTGCCTCCTCCCGTCCAGGTTGGTGAGATCTCTGAG | | PLLMAIKGQIYDVSQSR | |
| | GAGGAGCTCAAGCAGTACGACGGCAGTGACTCCAAG | | MFYGPGGPYALFAGKDA | |
| | AAGCCTCTTCTCATGGCCATCAAGGGCCAGATTTAC | | SRALAKMSFEEKDLTGD | |
| | GATGTCAGCCAGAGCCGAATGTTCTACGGACCCGGT | | ISGLGPFELEALQDWEY | |
| | GGCCCTTACGCTCTGTTTGCCGGCAAGGATGCTTCT | | KFMSKYVKVGTVEKPVS | |
| | CGAGCTCTGGCCAAAATGTCATTTGAAGAGAAGGAC | | ETDAAPAGESAESTNAE | |
| | CTGACTGGTGACATTTCCGGACTCGGCCCATTCGAG | | VSKPAEDGPSESQADKA | |
| | CTTGAGGCCCTCCAGGATTGGGAATACAAGTTCATG | | EETVAAKVE | |
| | TCCAAGTACGTTAAGGTCGGCACCGTTGAGAAGCCC | | | |
| | GTCAGCGAGACAGACGCTGCTCCCGCCGGTGAGTCT | | | |
| | GCTGAGTCCACCAACGCCGAGGTGTCCAAGCCCGCT | | | |
| | GAGGACGGTCCTTCCGAGTCCCAGGCCGACAAGGCT | | | |
| | GAGGAGACAGTCGCTGCCAAGGTTGAGTAG | | | |
| 1338489 | ATGGAGCTGTACTGGAAGGCCATGGAGCAGATCGCC | 330 | MELYWKAMEQIAWYTGLS | 3 |
| | TGGTACACTGGTCTGTCCCCCACCGCCTTCTTCACC | | PTAFFTILASMIFVFQMV | |
| | ATTCTGGCCTCCATGATCTTTGTGTTCCAGATGGTC | | SSMFVSPEEFNKPPTVPV | |
| | AGCTCCATGTTCGTTTCTCCCGAGGAGTTCAACAAG | | SSSNPANSNLFVNDSVAD | |
| | CCTCCCACCGTCCCCGTCAGCTCTTCCAACCCCGCC | | ASQAVQIGQLTEQQLRAY | |
| | AACTCCAACCTCTTCGTCAACGACTCTGTGGCTGAT | | DGSDPNKPLLMAIKGQIY | |
| | GCTTCCCAGGCCGTCCAGATTGGTCAGCTCACCGAG | | DVSSGRMFYGPGSPYAMF | |
| | CAGCAGCTCCGTGCTTATGACGGCAGTGACCCCAAC | | AGKDASRALALLSFKPED | |
| | AAGCCTCTTCTCATGGCCATCAAGGGCCAGATCTAC | | ITGNIEGLSEEELVILQD | |
| | GACGTTTCTTCTGGACGAATGTTCTACGGACCGGGC | | WEYKFMEKYVKVGELVLE | |
| | TCTCCTTACGCTATGTTTGCCGGCAAGGATGCTTCT | | GGGEGMNEHSENGHRNFE | |
| | CGAGCTCTGGCTCTGCTGTCCTTCAAGCCCGAGGAC | | IDQEEERIEAR | |
| | ATCACCGGTAACATCGAGGGTTTGTCCGAGGAGGAG | | | |
| | CTCGTTATCCTTCAGGACTGGGAGTACAAGTTCATG | | | |
| | GAGAAGTACGTCAAGGTTGGTGAGCTTGTCCTTGAG | | | |
| | GGAGGAGGAGAAGGGATGAACGAGCACTCCGAGAAC | | | |
| | GGTCACCGAAACTTTGAGATTGACCAGGAGGAGGAG | | | |
| | CGAATCGAGGCTCGATAG | | | |
| 1338490 | ATGGCTCTGCAAGTCTGGGAGACTCTCAAGGAGGCC | 331 | MALQVWETLKEAIVAYTG | 2 |
| | ATTGTCGCTTACACCGGTCTGTCTCCCGCTACCTTC | | LSPATFFTVLALGLAVYY | |
| | TTCACTGTGCTCGCTCTTGGTTTGGCCGTCTACTAC | | VISGFFGTSDYGSHSRDF | |
| | GTCATTTCGGGCTTCTTCGGCACCTCGGACTACGGC | | GEQMQPLPPPVQVGEISE | |
| | TCTCACTCTCGAGATTTCGGTGAGCAGATGCAGCCC | | EELKQYDGSDSKKPLLMA | |
| | CTGCCTCCTCCCGTCCAGGTTGGTGAGATCTCTGAG | | IKGQIYDVSQSRMFYGPG | |
| | GAGGAGCTCAAGCAGTACGACGGCAGTGACTCCAAG | | GPYALFAGKDASRALAKM | |
| | AAGCCTCTTCTCATGGCCATCAAGGGCCAGATTTAC | | SFEEKDLIGDISGLGPFE | |
| | GATGTCAGCCAGAGCCGAATGTTCTACGGACCCGGT | | LEALQDWEYKFMSKYVKV | |
| | GGCCCTTACGCTCTGTTTGCCGGCAAGGATGCTTCT | | GTVEKPVSETDAAPAGES | |
| | CGAGCTCTGGCCAAAATGTCATTTGAAGAGAAGGAC | | AESTNAEVSKPAEDGPSE | |
| | CTGACTGGTGACATTTCCGGACTCGGCCCATTCGAG | | SQADKAEETVAAKQKKEK | |
| | CTTGAGGCCCTCCAGGATTGGGAATACAAGTTCATG | | KKGRRRVEGVLMEIRGEA | |
| | TCCAAGTACGTTAAGGTCGGCACCGTTGAGAAGCCC | | VGGRKGEGMSREIGRGGG | |
| | GTCAGCGAGACAGACGCTGCTCCCGCCGGTGAGTCT | | GADDGNLKGGGIDHGERE | |
| | GCTGAGTCCACCAACGCCGAGGTGTCCAAGCCCGCT | | RERERESGMS | |
| | GAGGACGGTCCTTCCGAGTCCCAGGCCGACAAGGCT | | | |
| | GAGGAGACAGTCGCTGCCAAGCAGAAGAAGGAGAAG | | | |
| | AAGAAGGGCCGACGACGAGTCGAGGGTGTTCTCATG | | | |
| | GAGATCCGAGGCGAGGCCGTTGGTGGCCGAAAGGGC | | | |
| | GAGGGCATGTCGAGGGAGATTGGCCGAGGTGGTGGT | | | |
| | GGTGCCGACGACGGCAACCTCAAGGGTGGTGGTATC | | | |
| | GACCACGGTGAGCGAGAACGAGAGCGAGAACGAGAG | | | |
| | TCCGGCATGTCTTAG | | | |

TABLE 6
Non-Limiting Examples of CDSs.

| | Nucleic acid | Protein |
|---|---|---|
| Name | SEQ ID NO | SEQ ID NO |
| A0A0K9RW03_m | 184 | 224 |
| AquAgaCDS1_m | 185 | 225 |
| AquAgaCDS16 | 186 | 226 |
| AquAgaCDS6 | 187 | 227 |
| BenHisCDS2_m | 188 | 228 |
| A0A0D3QY32 | 189 | 229 |
| A0A0D3QXV2 | 190 | 230 |
| CmaCh17G013880.1 | 191 | 231 |
| A0A1S3CBF6 | 192 | 232 |
| CocGraCDS4 | 193 | 233 |
| CocGraCDS6_m | 194 | 234 |
| CSPI06G07180.1 | 195 | 235 |
| CucFoeCDS | 196 | 236 |
| CucMelMakCDS5 | 197 | 237 |
| CucMetCDS | 198 | 238 |
| CucPepOviCDS1_m | 199 | 239 |
| CucPepOviCDS2 | 200 | 240 |
| CucPepOviCDS3 | 201 | 241 |
| CucPepOviCDS3_m | 202 | 242 |
| Cucsa.349060.1 | 203 | 243 |
| F6GYI4 | 204 | 244 |
| GynCarCDS1 | 205 | 245 |
| GynCarCDS4 | 206 | 246 |
| K7NBZ9 | 207 | 247 |
| LagSicCDS2_m | 208 | 248 |
| Lus10014538.g_m | 209 | 249 |
| Lus10032146.g_m | 210 | 250 |
| MomChaCDS2 | 211 | 251 |
| MomChaCDS4 | 212 | 252 |
| O23909_PEA_Y118L | 213 | 253 |
| Q6BE24 | 214 | 254 |
| SecEduCDS | 215 | 255 |
| SgCDS1 | 216 | 256 |
| SgCDS_Scer1 | 217 | 257 |
| TriKirCDS10 | 218 | 258 |
| TriKirCDS4 | 219 | 259 |
| XP_006340479.1 | 220 | 260 |
| XP_008655662.1 | 221 | 261 |
| XP_010541955.1_m | 222 | 262 |
| XP_016688836.1_m | 223 | 263 |

TABLE 7
Non-Limiting Examples of C11 Hydroxylases (P450s),
Cytochrome P450 Reductases, Epoxide Hydrolases
(EPHs), and Squalene Epoxidases.

| | Nucleic acid | Protein |
|---|---|---|
| Enzyme | SEQ ID NO | SEQ ID NO |
| C11 hydroxylase | 264 | 280 |
| C11 hydroxylase (cucurbitadienol oxidase) | 265 | 281 |
| Cytochrome P450 reductase | 266 | 282 |
| Cytochrome P450 reductase | 267 | 283 |
| Epoxide hydrolase | 268 | 284 |
| Epoxide hydrolase | 269 | 285 |
| Epoxide hydrolase (epoxide hydratase) | 270 | 286 |
| Epoxide hydrolase (epoxide hydratase) | 271 | 287 |
| Epoxide hydrolase (epoxide hydratase) | 272 | 288 |
| Epoxide hydrolase (epoxide hydratase) | 273 | 289 |
| Epoxide hydrolase (epoxide hydratase) | 274 | 290 |
| Epoxide hydrolase (epoxide hydratase) | 275 | 291 |
| Epoxide hydrolase (epoxide hydratase) | 276 | 292 |
| Squalene epoxidase | 277 | 293 |
| Squalene epoxidase | 278 | 294 |
| Squalene epoxidase | 279 | 295 |

TABLE 8
Sequences of Additional Enzymes Associated with the Disclosure

| | Nucleic Acid | Protein |
|---|---|---|
| Name | SEQ ID NO | SEQ ID NO |
| CYP1798 | 296 | 305 |
| AtCPR | 297 | 306 |
| CPR4497 | 298 | 307 |
| sgCDS | 299 | 308 |
| EPH3 | 300 | 309 |
| atEPH2 | 301 | 310 |
| ERG9 | 302 | 311 |
| ERG1 | 303 | 312 |
| ERG7 | 304 | 313 |
| CYP5491 | 314 | 315 |
| SgCDS | 319 | 247 |
| CYP1798 | 320 | 280 |
| CYP5491 -T351M | 321 | 324 |
| SgEPH3 | 322 | 286 |
| AtCPR | 323 | 283 |
| ERG1 | 326 | 328 |
| ERG7 (comprising L491Q, Y586F, and | 327 | 329 |
| R660H relative to SEQ ID NO: 337) | | |
| ERG7 (comprising K47E, L92I, T360S, | 332 | 336 |
| S372P, T444M, and R578P relative to | | |
| SEQ ID NO: 337) | | |
| CPR4497 | 333 | 282 |
| CYP1798 | 334 | 280 |
| CYP1798 | 320 | 280 |
| CYP1798 | 335 | 280 |
| ERG7 | 338 | 337 |

### EQUIVALENTS

[0293] Those skilled in the art will recognize, or be able to ascertain using no more than routine experimentation, many equivalents to the specific embodiments of the invention described in this application. Such equivalents are intended to be encompassed by the following claims.

[0294] All references, including patent documents, disclosed in this application are incorporated by reference in their entirety, particularly for the disclosure referenced in this application.

The application's sequence listing, which the Patent Office published only in electronic form, follows.

SEQUENCE LISTING (338 sequences)

SEQ ID NO: 1 - protein, 213 aa, Siraitia grosvenorii
MALQVWETLKEAIVAYTGLSPATFFTVLALGLAVYYVISGFFGTSDYGSHSRDFGEQMQPLPPPVQVGEISEEELKQYDGSDSKKPLLMAIKGQIYDVSQSRMFYGPGGPYALFAGKDASRALAKMSFEEKDLTGDISGLGPFELEALQDWEYKFMSKYVKVGTVEKPVSETDAAPAGESAESTNAEVSKPAEDGPSESQADKAEETVAAKVE

SEQ ID NO: 2 - protein, 280 aa, Siraitia grosvenorii
MALQVWETLKEAIVAYTGLSPATFFTVLALGLAVYYVISGFFGTSDYGSHSRDFGEQMQPLPPPVQVGEISEEELKQYDGSDSKKPLLMAIKGQIYDVSQSRMFYGPGGPYALFAGKDASRALAKMSFEEKDLTGDISGLGPFELEALQDWEYKFMSKYVKVGTVEKPVSETDAAPAGESAESTNAEVSKPAEDGPSESQADKAEETVAAKQKKEKKKGRRRVEGVLMEIRGEAVGGRKGEGMSREIGRGGGGADDGNLKGGGIDHGERERERERESGMS

SEQ ID NO: 3 - protein, 209 aa, Siraitia grosvenorii
MELYWKAMEQIAWYTGLSPTAFFTILASMIFVFQMVSSMFVSPEEFNKPPTVPVSSSNPANSNLFVNDSVADASQAVQIGQLTEQQLRAYDGSDPNKPLLMAIKGQIYDVSSGRMFYGPGSPYAMFAGKDASRALALLSFKPEDITGNIEGLSEEELVILQDWEYKFMEKYVKVGELVLEGGGEGMNEHSENGHRNFEIDQEEERIEAR

SEQ ID NO: 4 - protein, 332 aa, Siraitia grosvenorii
MTATITAQHRNGCGPSPPKKLDILRVSFRKYRKAIEQPTEAISRLIAKRDRCRAFRPSIRFKKSHSTVPTTIVYDLTSYLDEHPGGDDVILAATGRDATDDFEDAGHSKDARELMQKFYIGLLDTSSSASPELETKQPRGYAARVQGLTKQYWAAPVAILGISLAVQKNTLYVGGLAEEVNESILHAAFIPFGDIKDVKTPLDQATQKHRSFGFVTFLEKEDASAAMDNMDGAELYGRVLTVNYALPERIKGGEQGWAAQPIWADADTWFERQQQEEEMQRIQAENRAAMQAAEELHRKKLAQEREGEKEDEIDTKDDPMAKAEAEVLRQNS

SEQ ID NO: 5 - protein, 158 aa, Siraitia grosvenorii
MVGKAMRRNRAHKDRVFNFLLPDPKVFVFDEVAKHNHLRDCWIIISGKVYDVTPFLEEHPGGDEVLLLAAEKDATDDFENVGHSLAAIEQMEKYYVGKVDMSTVPKPIDYRPPASHPATTPSAQSSGSLIRLLQFLIPLLILGVAFYLQFYGKKQQSN

SEQ ID NO: 6 - protein, 700 aa, Siraitia grosvenorii
MKDFQDEIAASGAVPAADHKLLRTEPAECMAAWRQRRALVPHHANAAAELSASSVVFLFVIVVFVGVVVEIFFVAHSSISDILTGCDVGDDSDPVVDSSLSFSSSLFSSCSFSSSSAASAAAAALLLHRLLLVLLRLPSRTLFSPPIRRCLSVGLGCRVLVLRLERGSIRTSHRAGTSLNRRSCSVWNSGEMFGDGKRISTILGTVETQAEPARFSRSLSLKDFQVLLSLPKRPLPALGSSSRIMSSRVRLRISAARPVAGGPSLFRRQPPSVLPIEAGHRKKRKCQMELDAGMASARTWELGRRKKKKKIFRSKFENLESKMQDEEKRGSGWCENAIASASPTHTQHSIDCRTSLPLFHAATMGGRSVYTLAEVASHDNRNDCWLIIENKVYDVTKFLEDHPGGDEVLLSAIGKDATNDFDDVGHSSAARAMMDEFYVGDIDSSTIPAKRKYTPPKQPLYNQDKTPEFIIKVLQFLVPLVCSHRPRKNLTTHCGALVAQNTGLEPCTGGEGAHFEQHEHQPLARASGNQLVCRASSCLSLIDPDEPVKVIKSSNIQLGSYPSLEVKSASNSAIKHHSTSQKPEKEIDWNSQFFNWQKADYCLNNNLPELLYSKREKLEAICSEQAFDAIASMQRLTTSAHRQEGVNSHIAATLQHTFQGSWRRYSQDILQLANQDYPLRTLQSFQDNQIHNIAAQHFLE

SEQ ID NO: 7 - protein, 126 aa, Siraitia grosvenorii
MASDPKVQVFEEVAKHNKPKIVYDVTPFMEDHPGGDEVLLSATGKDATNDFEDVGHSDSAREMMDKYYIGEIDPSTVPLKKIYIPTQQTQYTPDKTPEFVIKILQILVPILILGLAFAVRHYTKNE

SEQ ID NO: 8 - protein, 308 aa, Siraitia grosvenorii
MPSISTLYSIQEVSQHSTNDDCWIVIDGKVYDLTSYLDEHPGGDDVILAATGRDATDDFEDAGHSKDARELMQKFYIGLLDTSSSASPELETKQPRGYAARVQGLTKQYWAAPVAILEKTTTKKNLKELQKWRINASNGAGSSEKHFVRRWFGGGGERVYPTCSLHTLRRHQRRQDSIGSSHPEAPFLRLRHFLGKEDASAAMDNMDGAELYGRVLTVNYALPERIKGGEQGWAAQPIWADADTWFERQQQEEEMQRIQAENRAAMQAAEELHRKKLAQEREGEKEDEIDTKDDPMAKAEAEVLRQNS

SEQ ID NO: 9 - protein, 861 aa, Siraitia grosvenorii
MTVREIVDISNLAESCTSLLCRRQNNRFVHIAARFVVDEDVEGVWLEELLEALTLVCEEGLRLSLSDASCQGRSVLIYLREDAHERERLSFSSVKRWRERSCEPRPPLSGFWRLWWQLLRFSSASPSNPDIRSPPPPPSSPLNRSVFDVTKGKSHYGVGGGYNHFAGRDASRAFVSGNFTGEGLTDSLRGLSNAEIKSVVEWRNFYNKTYTFVGKLVGLHYDDQGNPTKHLKGAEAKAARGAQLLKKQKEEEDKLPSCNSRWSQGEGGEVWCDDGFPRLVQRPLEIALSGKMSKRCACFREDQLAEPGLEVYEAALFPKRTNDDGAAKILPPSDPCCFSCFPSGWCAGSIRNWISKSISSDFNTTTLPQQFLYVRSFPEGDKNCYIIKLAQGKGYKYLIRASFMYGNYDGQGKAPAFDLHMGVNKWDSVILNNESSIIIKEVIHALPTSSICICLVNTGFGSPFISALELRLLKNATYVTDFELLALHRRLDIGSTTNKTVRYNDDDCDRIWLPFNFPNYKIVSASSTVDSGVTALMNIKSLYGVRKNWQGDPCMPKSYVWHGLNCSYDSHSPNRITSLNLSSSRLVGETAAYVSELTSLQYLDLSNNSLSGPVPGFLSELHSLKVLDLRDNTLLGSIPSELMERSTNVKEIDGSDYYSNLSLDIVNCFMEGLEETPIFVLHLLAKTRRRVTLFQSNCSNSFIIAGPLSCNSSLDHEMMKTRYYASGRLTEKSDVYSFGALILEIITSRPVLKINRASSEKCHVGQWAMHLMKTGDIRSIVDERLRGNFDLSSAWKAVEIAMTCLSQTSIERPSMKEVVMELSECLALEKARKRKNIDSNTRSSNAVSRNFSESEVTPLAR

SEQ ID NO: 10 - protein, 134 aa, Siraitia grosvenorii
MGSGEKVFTLKEVAEHNNQKDCWLVISGKVYDVTKFLDDHPGGDDVLLSATGKDATDDFEDVGHSDNAREMMDQYYVGEIDASTIPKKVAYAPPKQPHYNQDKTSEFIIKLLQFLVPLAILGLAVAIRFYTKQA

SEQ ID NO: 11 - DNA, 642 bp, Artificial Sequence
  Synthetic
atggccttgcaggtgtgggaaaccttaaaagaggctattgtagcttatacggggctttcccctgcaacatttttcactgtcctagctttgggtctggcggtttactacgttatctcaggtttctttggaacctctgattatggttctcacagtcgtgacttcggtgaacaaatgcaacccttaccaccaccagtccaagttggcgaaatatccgaagaggaattgaagcaatacgacggtagcgattcaaagaagccattgctaatggctatcaaaggccaaatttacgatgtctcgcaatctaggatgttctatggtcccggtggtccatacgccctctttgctggtaaggacgcttctcgagctttggcaaaaatgtccttcgaagaaaaggacttgactggtgatatttctggtttgggccctttcgaattagaagccttacaggattgggaatacaagtttatgtccaaatacgttaaggtcggtactgttgaaaagccagtttcagagacagatgctgcccctgctggtgaatctgcggagtctactaacgctgaagtctcgaaaccagcagaagacggtccttctgaatcccaagctgataaggctgaagagactgtagccgctaaggttgaatag

SEQ ID NO: 12 - DNA, 843 bp, Artificial Sequence
  Synthetic
atggccttgcaggtatgggagactctaaaagaagcaattgtcgcttataccggtcttagtccagctacgttctttacagtgttggctctgggattagccgtttactacgtcatatctggtttctttggtacctcggactatggctcacattctcgtgatttcggggaacaaatgcaacctttgccaccgccagttcaagttggtgaaatctccgaagaggaattaaagcaatacgatggttctgacagcaagaagccattgttgatggctattaaaggtcaaatctacgacgtttcccaatctaggatgttttacggtccaggtggtccctatgcgcttttcgctggcaaggatgcctcgcgcgctttggctaagatgagttttgaagaaaaagacctgactggggatatttcaggattaggccctttcgaattggaagctctccaggattgggaatataagttcatgtctaagtacgtcaaagtgggtactgttgaaaagccagtttccgagacagacgcagccccagctggtgaatctgccgaaagtaccaacgctgaagtctccaaacctgctgaagatggtccaagcgaatcccaagctgacaaggcggaggaaactgtagccgctaagcaaaaaaaggaaaaaaagaagggtagaagaagagttgaaggtgtcctaatggaaatcagaggtgaagcggttggtgggagaaagggtgagggaatgtcaagagaaatcggtcggggtggtggtggtgctgatgatggtaatttgaaaggtggcggtattgaccacggtgaacgtgagcgagagagagaaagagagtctggtatgtcttag

SEQ ID NO: 13 - DNA, 630 bp, Artificial Sequence
  Synthetic
atggaattgtactggaaagcaatggagcagattgcctggtataccggcttatctcctacagctttctttactatactggcttcgatgatcttcgtgtttcaaatggtcagttccatgttcgtttctccggaagaatttaataagcccccaactgtcccagtttcctcatctaacccagctaactctaatctattcgtaaacgacagcgttgcggatgccagccaagctgttcaaattggtcaattgacggaacaacagttgagggcttacgatggatccgacccaaacaagccattacttatggctatcaaaggtcaaatttatgatgtctctagtggtagaatgttctacggtcctggtagtccatacgcaatgttcgccggcaaggacgcttcaagagctttggcattgctctcttttaagccagaagacatcaccggtaacattgaaggtttgtcagaagaggaattagttatcttacaagattgggagtacaagttcatggaaaagtatgttaaagtgggggaattggttctcgaaggtggtggtgaaggtatgaatgaacactctgagaacggccatcgtaattttgaaatcgatcaagaagaagaaagaattgaggctagatag

SEQ ID NO: 14 - DNA, 630 bp, Artificial Sequence
  Synthetic
atggaactttattggaaggctatggagcaaatagcctggtacacagggttatcgcctacggcattctttactattctagctagtatgattttcgtctttcagatggtgtcatctatgttcgttagcccagaagaatttaataaaccaccaaccgtacccgtttcctcttccaaccctgctaactctaatttgttcgtcaacgatagcgttgctgacgcctctcaagcggtccaaatcggtcaattgaccgaacaacaattgcgtgcttacgatggttccgacccaaacaagccattactgatggccatcaagggtcagatttatgatgtttcctctggaaggatgttctacggcccgggttcaccatacgctatgttcgccggtaaagacgcgtcgagagctctcgctttgttgtcctttaagccagaagatatcactggtaacattgagggtttgagtgaagaagaattggttatcttacaagactgggaatacaagttcatggagaagtatgtgaaagtcggtgaacttgtcttggaaggtggaggtgaaggtatgaatgaacattcagagaatggccacagaaactttgaaattgatcaggaagaagaaagaatcgaagctagatag

SEQ ID NO: 15 - DNA, 999 bp, Artificial Sequence
  Synthetic
atgaccgccactatcacagcacagcaccgtaacggctgcggaccttccccacccaaaaagttggacattctgagagtaagtttccgaaagtatagaaaggctatagaacaaccaacggaggctatttcgagactaattgctaaaagagatcgctgtagagcgtttaggccatctatcagattcaagaaatcacattccaccgtgccaactactatcgtttacgatttgacctcttacttagacgaacaccctggtggtgatgacgttatcttggccgccactggtcgtgatgctacagacgattttgaagatgctggtcattctaaggatgctagagaacttatgcaaaagttctacattggtttattggacaccagctcttccgcttccccagagttggaaacgaaacaaccgagaggttatgctgcaagagtccaagggttgactaagcaatactgggcagctccagttgccatactcggtatttcattagccgtccaaaagaatactttgtacgtcggcggtctggctgaagaagttaacgaaagtatcttgcacgctgctttcattccttttggtgacattaaagacgttaagaccccgttagaccaagctacccagaagcatagatcattcgggtttgttactttcctagaaaaggaagatgcctctgcggctatggataatatggacggtgcggaattgtatggtcgtgtcttgactgtaaactacgccttgccagagagaatcaagggtggagaacaaggttgggctgcgcaaccaatctgggctgatgctgatacctggttcgagagacaacaacaagaagaagaaatgcagagaatacaagccgaaaaccgcgccgctatgcaagctgctgaagagctacacagaaaaaagcttgctcaggaaagagaaggtgaaaaagaagatgaaattgataccaaagacgacccgatggccaaggcagaagctgaggtcctacgacaaaatagttag

SEQ ID NO: 16 - DNA, 477 bp, Artificial Sequence
  Synthetic
atggttggaaaggccatgaggagaaatagagctcataaagatcgtgtcttcaactttttgctgccagaccctaaggtattcgtttttgatgaggttgcaaagcacaaccacttaagagactgctggatcataatttcaggcaaagtctatgatgttacaccattcttggaagaacatccgggtggtgacgaagtgcttctattagctgctgaaaaggatgcgactgacgattttgaaaatgtcggtcacagcttggctgccatcgaacaaatggagaagtactacgttggtaaagtcgacatgtccacggtcccaaagccaattgactatcggccccctgcttctcatccagctaccaccccatctgcccagagttctggttcgttgattcgattgcttcaattcttgatcccattattgattttaggtgttgctttctacttacaattttacgggaagaaacaacaatccaactag

SEQ ID NO: 17 - DNA, 2103 bp, Artificial Sequence
  Synthetic
atgaaggattttcaggacgagatcgcagccagtggtgctgtccctgctgctgaccacaaactactgcgtacagaacccgctgaatgcatggccgcatggagacaacgcagagctttggtgccacatcacgccaacgctgctgccgaattgtctgctagctcagttgttttcttgttcgttatagtagtctttgttggcgtcgttgtcgaaattttcttcgttgcgcattcttccatttctgatatcttaaccggttgtgacgttggtgatgattccgacccagtagtggattcgtctttgtccttttctagcagtcttttctcttcctgttctttttcctcatcatcggccgctagtgctgcggctgctgcattattgctccacaggttgttacttgttttgttgagactaccatctcggactttgttctcgccacctattagaagatgtttgtccgtcggacttggttgtagagtcttagttttaagattggaaagaggttctattcgaacttcacatagagctggtacgtctttaaatagaagatcatgttccgtatggaactcaggggaaatgttcggtgacggtaagcgtatcagcaccattctagggactgttgagacacaagcagaaccagcaagattttctcgctctttgtccttgaaggatttccaagtcctactgagcttgcctaaaagaccattgccagctttgggtagctcttcccgtatcatgtcttctcgcgtcagactgagaataagtgcggccagaccagttgctggtggtccgagtctattcaggcgacaaccaccgtctgtactgccaatcgaagctggacacagaaagaaaagaaagtgccaaatggaattggacgctggtatggcctccgctagaacttgggagttaggtagacgtaagaagaaaaagaaaatttttagaagcaagttcgaaaacttggaatctaagatgcaggatgaagaaaaaagaggtagtggttggtgtgagaatgctatcgcctccgcttctccaacccacacccaacactcaattgactgccggacgtccctaccactctttcatgccgcgactatgggcggtagatccgtttacactttggctgaagttgccagtcatgataatagaaacgattgttggttaattatagaaaacaaggtttatgatgttactaagttcttagaagaccatccaggtggcgacgaagtcttgttgtccgctatcggtaaggatgctaccaatgactttgacgatgtgggtcacagttccgctgctagagctatgatggatgaattttacgttggtgacatcgattcttctactattcccgccaagcgtaaatacacccctcctaagcaaccattgtataaccaagacaaaaccccagaatttattataaaggtacttcaattcttggtccctctagtttgttctcatagaccaagaaaaaatcttacaactcactgcggagcactcgtcgcgcaaaacaccggtttggaaccatgtactggcggggaaggtgctcatttcgaacagcacgaacaccaacccttggccagagcttctggtaatcaattggtttgtcgggcttcctcctgtctctctttgatcgatccagatgagccagttaaggttatcaagtcttctaacattcaactaggttcatacccctccttggaggtgaaaagtgcttcgaacagtgctatcaagcaccatagtacatctcagaagcctgaaaaagaaatagattggaatagccaattcttcaactggcaaaaggctgattattgtttaaacaacaatctgccagaattgttatacagcaaaagagaaaagttggaagctatttgctctgaacaagcttttgacgcaattgcctccatgcaaagactaactacaagcgcccaccgtcaagaaggtgttaactctcacatagcggccactctacaacacacgtttcaaggttcgtggagaagatactcacaagatatcttgcaattagccaaccaagactatccattgagaaccttgcaaagtttccaagacaaccaaattcataatattgctgctcaacatttcctcgaatag

SEQ ID NO: 18 - DNA, 381 bp, Artificial Sequence
  Synthetic
atggcctctgatccaaaggtgcaagtcttcgaagaggttgctaaacacaacaagcctaaaattgtctacgacgtaaccccatttatggaagatcatccaggaggtgacgaagttttactttccgcaactggtaaggatgctacaaatgacttcgaagatgttggccactcagattcggcgagagaaatgatggacaagtattacatcggtgaaatagaccccagcactgtcccgctgaagaaaatttacatcccaacccagcaaactcaatatacgcctgacaagactccagagtttgttataaagattttgcaaatcttggtcccaattttgatcttaggtttggctttcgctgttcgtcattacaccaagaacgaatag

SEQ ID NO: 19 - DNA, 927 bp, Artificial Sequence
  Synthetic
atgccttcaatctctacgctctactcgatacaggaggtatctcaacatagtacaaatgatgactgctggattgtgattgatggcaaggtttatgacttgacttcctacctagatgaacacccgggtggagatgacgttatcttagctgccaccggtcgtgatgcaaccgacgactttgaagatgctggtcactccaaagacgctagagaattgatgcaaaagttctatatcggtcttttagacactagctcttcagcgtcccccgaattggagactaagcaaccaagagggtacgccgctagggtccaaggtctgaccaaacaatactgggccgcaccagtcgctattttggaaaagactaccactaagaaaaacttgaaggaattgcaaaagtggagaattaacgcctctaatggtgctggatcttccgaaaagcatttcgttcggcgctggtttggtggtggtggtgaaagagtctatccaacatgttcactacataccttgagaagacaccagcgtagacaagacagtataggtagctctcacccagaggctcctttcctgagattacgtcacttcctaggcaaagaagatgcctccgcagcgatggataacatggatggtgctgaactttacggtagagttttaactgttaactacgctttgccagaaagaatcaagggtggtgaacaaggatgggctgcccaaccaatttgggctgacgctgatacatggtttgaaagacaacaacaagaagaggaaatgcaaaggatccaagccgaaaacagagctgctatgcaggctgccgaagaattgcatagaaaaaagttggctcaggaaagagagggtgagaaggaagatgaaattgacactaaagatgatccaatggctaaagcagaagctgaagttttacgacaaaattcttag

SEQ ID NO: 20 - DNA, 2586 bp, Artificial Sequence
  Synthetic
atgaccgtcagagagatagttgacatttcaaacctagctgaatcctgcacttctcttttatgtcgtaggcaaaataacagattcgtgcatatcgccgcaagatttgttgttgatgaagatgtagaaggagtctggctggaagaattgttggaagctttgacgttggtttgtgaagaaggtctaagactcagcttatcggacgcttcttgtcagggtagatccgtcttgatctacttgcgagaggatgcccacgaacgcgaaagactctctttctctagtgttaaaagatggcgtgagagaagctgtgaacccaggccacctttatctgggttttggagattatggtggcaattgttgagattctccagtgcttctccatccaatccagacattagatcaccgcctccaccaccctcctctccactgaacagaagcgttttcgatgtcacaaagggtaagtctcactatggcgtaggtggtggttacaaccattttgcgggcagagatgctagtagagccttcgtttccggtaattttactggtgaaggtctaaccgactctttgcgtggtttgagtaacgctgaaattaaaagtgttgtggagtggagaaacttctacaataagacttataccttcgtcggaaagttagttggtttgcactacgacgaccaaggtaacccaacaaagcatttgaaaggtgctgaagctaaggctgccaggggtgcacaactattgaagaaacaaaaggaagaagaagataaattgccctcttgcaactccagatggtcacaaggagaaggtggtgaggtctggtgtgatgacggttttcctcggcttgttcagcgcccattagaaatcgccttgtccggcaagatgtctaagagatgtgcttgtttccgtgaagaccaacttgctgaaccagggttggaagtctacgaggcagctctttttcctaagagaactaatgatgatggcgctgcaaagattttgcctccatcagatccatgctgtttcagctgcttcccatccggttggtgtgccggttccatacgtaactggatcagcaaatctatttcttctgactttaataccactacattgccacaacaatttctctatgtcagaagtttcccagaaggtgataaaaactgttacataatcaagttggcgcagggtaagggatataaatacttaatccgggcttcattcatgtacggtaactatgacggtcaaggtaaggctccagccttcgacttacacatgggggttaataagtgggattcggttattttgaacaatgaatcatctatcattattaaggaagtcatccacgctttaccaacttcttctatatgtatttgtttggtgaataccggtttcggtagcccattcatttccgccctcgaactaagattgttaaagaacgccacttacgtcaccgattttgaattacttgctttgcatcgtcgtttagacatcggttccacgactaacaaaactgttagatacaatgatgacgattgcgacagaatctggttgcctttcaacttccctaattataagatagtctctgcttcttcaaccgtggatagcggcgttacggctctgatgaacattaagtctttgtacggtgttagaaagaactggcaaggtgacccatgtatgccaaaatcctatgtctggcacggtttgaactgttcgtatgattcgcactcaccgaacagaattacttctcttaatttgagctcgtctaggctggttggtgaaactgctgcttacgtcagtgaattaacctccttgcaatacttggatctaagtaacaactctttgtcgggtcccgtgccgggttttctttccgaattacattccttgaaggttctggatttgagagacaataccttgcttggatctatcccatccgaattgatggaaagatcgacaaacgtaaaagagatcgacggttctgattactactctaatttaagccttgatattgttaattgttttatggaaggattggaagagacaccaatctttgtcttgcatcttttggcaaagactagaagaagagttactttattccaatccaactgttctaattcgttcattatcgcgggcccactctcttgtaactcaagcttggaccatgaaatgatgaagaccagatattatgcatctggcagattaacagaaaagagtgacgtatactctttcggggctttgattttggagattatcacttcaaggccagtcttgaaaatcaaccgtgcttccagcgaaaaatgccacgttggtcaatgggcaatgcacctcatgaaaactggtgatatcagatcaattgttgatgagagactcagaggtaactttgacctgtcctctgcttggaaggctgttgaaattgcaatgacctgtctatctcagacatcaatagaaagaccctctatgaaggaagtggtcatggaattatctgaatgtcttgctttggaaaaggcccgtaagagaaaaaatattgattctaacactagaagctccaacgctgttagtagaaacttcagtgaaagtgaagtgacgccattggccagatag

SEQ ID NO: 21 - DNA, 405 bp, Artificial Sequence
  Synthetic
atgggctctggtgagaaagtgtttacactgaaggaagtcgctgaacataacaatcaaaaggactgctggctagtaatcagcggtaaggtttatgatgttaccaaattcttagacgatcacccaggtggagatgacgttttgctttcggcaactggtaaggatgcgactgacgatttcgaagacgtcggtcactccgataacgctcgtgaaatgatggaccagtactacgtcggtgagattgatgcttcaacgatacctaagaaagttgcctatgcccccccaaagcaaccacattacaatcaagacaaaacctccgaatttattatcaagttgttgcaattcttggttccgctcgctatcttagggttggctgttgccattagattctacactaagcaagcttag

SEQ ID NO: 22 - DNA, 642 bp, Artificial Sequence
  Synthetic
atggctctgcaagtctgggagactctcaaggaggccattgtcgcttacaccggtctgtctcccgctaccttcttcactgtgctcgctcttggtttggccgtctactacgtcatttcgggcttcttcggcacctcggactacggctctcactctcgagatttcggtgagcagatgcagcccctgcctcctcccgtccaggttggtgagatctctgaggaggagctcaagcagtacgacggcagtgactccaagaagcctcttctcatggccatcaagggccagatttacgatgtcagccagagccgaatgttctacggacccggtggcccttacgctctgtttgccggcaaggatgcttctcgagctctggccaaaatgtcatttgaagagaaggacctgactggtgacatttccggactcggcccattcgagcttgaggccctccaggattgggaatacaagttcatgtccaagtacgttaaggtcggcaccgttgagaagcccgtcagcgagacagacgctgctcccgccggtgagtctgctgagtccaccaacgccgaggtgtccaagcccgctgaggacggtccttccgagtcccaggccgacaaggctgaggagacagtcgctgccaaggttgagtaa

SEQ ID NO: 23 - DNA, 843 bp, Artificial Sequence
  Synthetic
atggctctgcaagtctgggagactctcaaggaggccattgtcgcttacaccggtctgtctcccgctaccttcttcactgtgctcgctcttggtttggccgtctactacgtcatttcgggcttcttcggcacctcggactacggctctcactctcgagatttcggtgagcagatgcagcccctgcctcctcccgtccaggttggtgagatctctgaggaggagctcaagcagtacgacggcagtgactccaagaagcctcttctcatggccatcaagggccagatttacgatgtcagccagagccgaatgttctacggacccggtggcccttacgctctgtttgccggcaaggatgcttctcgagctctggccaaaatgtcatttgaagagaaggacctgactggtgacatttccggactcggcccattcgagcttgaggccctccaggattgggaatacaagttcatgtccaagtacgttaaggtcggcaccgttgagaagcccgtcagcgagacagacgctgctcccgccggtgagtctgctgagtccaccaacgccgaggtgtccaagcccgctgaggacggtccttccgagtcccaggccgacaaggctgaggagacagtcgctgccaagcagaagaaggagaagaagaagggccgacgacgagtcgagggtgttctcatggagatccgaggcgaggccgttggtggccgaaagggcgagggcatgtcgagggagattggccgaggtggtggtggtgccgacgacggcaacctcaagggtggtggtatcgaccacggtgagcgagaacgagagcgagaacgagagtccggcatgtcttaa

SEQ ID NO: 24 - DNA, 630 bp, Artificial Sequence
  Synthetic
atggagctgtactggaaggccatggagcagatcgcctggtacactggtctgtcccccaccgccttcttcaccattctggcctccatgatctttgtgttccagatggtcagctccatgttcgtttctcccgaggagttcaacaagcctcccaccgtccccgtcagctcttccaaccccgccaactccaacctcttcgtcaacgactctgtggctgatgcttcccaggccgtccagattggtcagctcaccgagcagcagctccgtgcttatgacggcagtgaccccaacaagcctcttctcatggccatcaagggccagatctacgacgtttcttctggacgaatgttctacggaccgggctctccttacgctatgtttgccggcaaggatgcttctcgagctctggctctgctgtccttcaagcccgaggacatcaccggtaacatcgagggtttgtccgaggaggagctcgttatccttcaggactgggagtacaagttcatggagaagtacgtcaaggttggtgagcttgtccttgagggaggaggagaagggatgaacgagcactccgagaacggtcaccgaaactttgagattgaccaggaggaggagcgaatcgaggctcgataa

SEQ ID NO: 25-45 - skipped (21 entries)

SEQ ID NO: 46 - DNA, 24 bp, Artificial Sequence
  Synthetic
gatgcacgagcgcaacgctcacaa

SEQ ID NO: 47 - protein, 6 aa, Artificial Sequence
  Synthetic
YTGLSP

SEQ ID NO: 48 - protein, 15 aa, Artificial Sequence
  Synthetic
KPLLMAIKGQIYDVS

SEQ ID NO: 49 - protein, 9 aa, Artificial Sequence
  Synthetic
LQDWEYKFM

SEQ ID NO: 50 - protein, 47 aa, Artificial Sequence
  Synthetic
  misc_feature (1)..(1): Xaa is Glutamic Acid (E) or Glutamine (Q)
  misc_feature (2)..(2): Xaa is Leucine (L) or Valine (V)
  misc_feature (3)..(3): Xaa is Tyrosine (Y) or Tryptophan (W)
  misc_feature (4)..(4): Xaa is Tryptophan (W) or Glutamic Acid (E)
  misc_feature (5)..(5): Xaa is Lysine (K) or Threonine (T)
  misc_feature (6)..(6): Xaa is Alanine (A) or Leucine (L)
  misc_feature (7)..(7): Xaa is Methionine (M) or Lysine (K)
  misc_feature (9)..(9): Xaa is Glutamine (Q) or Alanine (A)
  misc_feature (11)..(11): Xaa is Alanine (A) or Valine (V)
  misc_feature (12)..(12): Xaa is Tryptophan (W) or Alanine (A)
  misc_feature (19)..(19): Xaa is Threonine (T) or Alanine (A)
  misc_feature (20)..(20): Xaa is Alanine (A) or Threonine (T)
  misc_feature (24)..(24): Xaa is Isoleucine (I) or Valine (V)
  misc_feature (27)..(27): Xaa is Serine (S) or Leucine (L)
  misc_feature (28)..(28): Xaa is Methionine (M) or Glycine (G)
  misc_feature (29)..(29): Xaa is Isoleucine (I) or Leucine (L)
  misc_feature (30)..(30): Xaa is Phenylalanine (F) or Alanine (A)
  misc_feature (32)..(32): Xaa is Phenylalanine (F) or Tyrosine (Y)
  misc_feature (33)..(33): Xaa is Glutamine (Q) or Tyrosine (Y)
  misc_feature (34)..(34): Xaa is Methionine (M) or Valine (V)
  misc_feature (35)..(35): Xaa is Valine (V) or Isoleucine (I)
  misc_feature (37)..(37): Xaa is Serine (S) or Glycine (G)
  misc_feature (38)..(38): Xaa is Methionine (M) or Phenylalanine (F)
  misc_feature (40)..(40): Xaa is Valine (V) or Glycine (G)
  misc_feature (41)..(41): Xaa is Serine (S) or Threonine (T)
  misc_feature (42)..(42): Xaa is Proline (P) or Serine (S)
  misc_feature (43)..(43): Xaa is Glutamic Acid (E) or Aspartic Acid (D)
  misc_feature (44)..(44): Xaa is Glutamic Acid (E) or Tyrosine (Y)
  misc_feature (45)..(45): Xaa is Phenylalanine (F) or Glycine (G)
  misc_feature (46)..(46): Xaa is Asparagine (N) or Serine (S)
  misc_feature (47)..(47): Xaa is Lysine (K) or Histidine (H)
XXXXXXXEXIXXYTGLSPXXFFTXLAXXXXVXXXXSXXFXXXXXXXX

SEQ ID NO: 51 - protein, 41 aa, Artificial Sequence
  Synthetic
  misc_feature (1)..(1): Xaa is Proline (P) or Alanine (A)
  misc_feature (4)..(4): Xaa is Valine (V) or Isoleucine (I)
  misc_feature (6)..(6): Xaa is Glutamic Acid (E) or Glutamine (Q)
  misc_feature (7)..(7): Xaa is Isoleucine (I) or Leucine (L)
  misc_feature (8)..(8): Xaa is Serine (S) or Threonine (T)
  misc_feature (10)..(10): Xaa is Glutamic Acid (E) or Glutamine (Q)
  misc_feature (11)..(11): Xaa is Glutamic Acid (E) or Glutamine (Q)
  misc_feature (13)..(13): Xaa is Lysine (K) or Arginine (R)
  misc_feature (14)..(14): Xaa is Glutamine (Q) or Alanine (A)
  misc_feature (20)..(20): Xaa is Serine (S) or Proline (P)
  misc_feature (21)..(21): Xaa is Lysine (K) or Asparagine (N)
  misc_feature (37)..(37): Xaa is Glutamine (Q) or Serine (S)
  misc_feature (38)..(38): Xaa is Serine (S) or Glycine (G)
XVQXGXXXEXXLXXYDGSDXXKPLLMAIKGQIYDVSXXRMF

SEQ ID NO: 52 - protein, 43 aa, Artificial Sequence
  Synthetic
  misc_feature (3)..(3): Xaa is Lysine (K) or Leucine (L)
  misc_feature (4)..(4): Xaa is Methionine (M) or Leucine (L)
  misc_feature (7)..(7): Xaa is Glutamic Acid (E) or Lysine (K)
  misc_feature (8)..(8): Xaa is Glutamic Acid (E) or Proline (P)
  misc_feature (9)..(9): Xaa is Lysine (K) or Glutamic Acid (E)
  misc_feature (11)..(11): Xaa is Leucine (L) or Isoleucine (I)
  misc_feature (14)..(14): Xaa is Aspartic Acid (D) or Asparagine (N)
  misc_feature (16)..(16): Xaa is Serine (S) or Glutamic Acid (E)
  misc_feature (19)..(19): Xaa is Glycine (G) or Serine (S)
  misc_feature (20)..(20): Xaa is Proline (P) or Glutamic Acid (E)
  misc_feature (21)..(21): Xaa is Phenylalanine (F) or Glutamic Acid (E)
  misc_feature (24)..(24): Xaa is Glutamic Acid (E) or Valine (V)
  misc_feature (25)..(25): Xaa is Alanine (A) or Isoleucine (I)
  misc_feature (35)..(35): Xaa is Serine (S) or Glutamic Acid (E)
  misc_feature (42)..(42): Xaa is Threonine (T) or Glutamic Acid (E)
  misc_feature (43)..(43): Xaa is Valine (V) or Leucine (L)
LAXXSFXXXDXTGXIXGLXXXELXXLQDWEYKFMXKYVKVGXX

SEQ ID NO: 53 - protein, 13 aa, Artificial Sequence
  Synthetic
  misc_feature (1)..(1): Xaa is Lysine (K) or Glutamic Acid (E)
  misc_feature (2)..(2): Xaa is Proline (P) or Histidine (H)
  misc_feature (3)..(3): Xaa is Alanine (A) or Serine (S)
  misc_feature (5)..(5): Xaa is Aspartic Acid (D) or Asparagine (N)
  misc_feature (7)..(7): Xaa is Proline (P) or Histidine (H)
  misc_feature (8)..(8): Xaa is Serine (S) or Arginine (R)
  misc_feature (9)..(9): Xaa is Glutamic Acid (E) or Asparagine (N)
  misc_feature (10)..(10): Xaa is Serine (S) or Phenylalanine (F)
  misc_feature (11)..(11): Xaa is Glutamine (Q) or Glutamic Acid (E)
  misc_feature (12)..(12): Xaa is Alanine (A) or Isoleucine (I)
XXXEXGXXXXXXD

SEQ ID NO: 54 - protein, 15 aa, Artificial Sequence
  Synthetic
ILRVSFRKYRKAIEQ

SEQ ID NO: 55 - protein, 18 aa, Artificial Sequence
  Synthetic
RAFRPSIRFKKSHSTVPT

SEQ ID NO: 56 - protein, 8 aa, Artificial Sequence
  Synthetic
KNTLYVGG

SEQ ID NO: 57 - protein, 20 aa, Artificial Sequence
  Synthetic
DQATQKHRSFGFVTFLEKED

SEQ ID NO: 58 - protein, 47 aa, Artificial Sequence
  Synthetic
QVWETLKEAIVAYTGLSPATFFTVLALGLAVYYVISGFFGTSDYGSH

SEQ ID NO: 59 - protein, 47 aa, Artificial Sequence
  Synthetic
ELYWKAMEQIAWYTGLSPTAFFTILASMIFVFQMVSSMFVSPEEFNK

SEQ ID NO: 60 - protein, 41 aa, Artificial Sequence
  Synthetic
PVQVGEISEEELKQYDGSDSKKPLLMAIKGQIYDVSQSRMF

SEQ ID NO: 61 - protein, 41 aa, Artificial Sequence
  Synthetic
AVQIGQLTEQQLRAYDGSDPNKPLLMAIKGQIYDVSSGRMF

SEQ ID NO: 62 - protein, 43 aa, Artificial Sequence
  Synthetic
LAKMSFEEKDLTGDISGLGPFELEALQDWEYKFMSKYVKVGTV

SEQ ID NO: 63 - protein, 43 aa, Artificial Sequence
  Synthetic
LALLSFKPEDITGNIEGLSEEELVILQDWEYKFMEKYVKVGEL

SEQ ID NO: 64 - protein, 13 aa, Artificial Sequence
  Synthetic
KPAEDGPSESQAD

SEQ ID NO: 65 - protein, 13 aa, Artificial Sequence
  Synthetic
EHSENGHRNFEID

SEQ ID NO: 66-120 - skipped (55 entries)

SEQ ID NO: 121 - protein, 453 aa, Siraitia grosvenorii
MDAQRGHTTTILMFPWLGYGHLSAFLELAKSLSRRNFHIYFCSTSVNLDAIKPKLPSSSSSDSIQLVELCLPSSPDQLPPHLHTTNALPPHLMPTLHQAFSMAAQHFAAILHTLAPHLLIYDSFQPWAPQLASSLNIPAINFNTTGASVLTRMLHATHYPSSKFPISEFVLHDYWKAMYSAAGGAVTKKDHKIGETLANCLHASCSVILINSFRELEEKYMDYLSVLLNKKVVPVGPLVYEPNQDGEDEGYSSIKNWLDKKEPSSTVFVSFGSEYFPSKEEMEEIAHGLEASEVHFIWVVRFPQGDNTSAIEDALPKGFLERVGERGMVVKGWAPQAKILKHWSTGGFVSHCGWNSVMESMMFGVPIIGVPMHLDQPFNAGLAEEAGVGVEAKRDPDGKIQRDEVAKLIKEVVVEKTREDVRKKAREMSEILRSKGEEKMDEMVAAISLFLKI

SEQ ID NO: 122 - protein, 9 aa, Artificial Sequence
  Synthetic
MDAQRGHTT

SEQ ID NO: 123 - protein, 5 aa, Artificial Sequence
  Synthetic
TILMF

SEQ ID NO: 124 - protein, 4 aa, Artificial Sequence
  Synthetic
PWLG

SEQ ID NO: 125 - protein, 16 aa, Artificial Sequence
  Synthetic
YGHLSAFLELAKSLSR

SEQ ID NO: 126 - protein, 3 aa, Artificial Sequence
  Synthetic
RNF

SEQ ID NO: 127 - protein, 4 aa, Artificial Sequence
  Synthetic
HIYF

SEQ ID NO: 128 - protein, 3 aa, Artificial Sequence
  Synthetic
CST

SEQ ID NO: 129 - protein, 6 aa, Artificial Sequence
  Synthetic
SVNLDA

SEQ ID NO: 130 - protein, 11 aa, Artificial Sequence
  Synthetic
IKPKLPSSSSS

SEQ ID NO: 131 - protein, 4 aa, Artificial Sequence
  Synthetic
DSIQ

SEQ ID NO: 132 - protein, 23 aa, Artificial Sequence
  Synthetic
LVELCLPSSPDQLPPHLHTTNAL

SEQ ID NO: 133 - protein, 21 aa, Artificial Sequence
  Synthetic
PPHLMPTLHQAFSMAAQHFAA

SEQ ID NO: 134 - protein, 8 aa, Artificial Sequence
  Synthetic
ILHTLAPH

SEQ ID NO: 135 - protein, 5 aa, Artificial Sequence
  Synthetic
LLIYD

SEQ ID NO: 136 - protein, 4 aa, Artificial Sequence
  Synthetic
SFQP

SEQ ID NO: 137 - protein, 9 aa, Artificial Sequence
  Synthetic
WAPQLASSL

SEQ ID NO: 138 - protein, 3 aa, Artificial Sequence
  Synthetic
NIP

SEQ ID NO: 139 - protein, 5 aa, Artificial Sequence
  Synthetic
AINFN

SEQ ID NO: 140 - protein, 3 aa, Artificial Sequence
  Synthetic
TTG

SEQ ID NO: 141 - protein, 12 aa, Artificial Sequence
  Synthetic
ASVLTRMLHATH

SEQ ID NO: 142 - protein, 21 aa, Artificial Sequence
  Synthetic
YPSSKFPISEFVLHDYWKAMY

SEQ ID NO: 143 - protein, 4 aa, Artificial Sequence
  Synthetic
SAAG

SEQ ID NO: 144 - protein, 6 aa, Artificial Sequence
  Synthetic
GAVTKK

SEQ ID NO: 145 - protein, 15 aa, Artificial Sequence
  Synthetic
DHKIGETLANCLHAS

SEQ ID NO: 146 - protein, 2 aa, Artificial Sequence
  Synthetic
CS

SEQ ID NO: 147 - protein, 4 aa, Artificial Sequence
  Synthetic
VILI

SEQ ID NO: 148 - protein, 7 aa, Artificial Sequence
  Synthetic
NSFRELE

SEQ ID NO: 149 - protein, 10 aa, Artificial Sequence
  Synthetic
EKYMDYLSVL

SEQ ID NO: 150 - protein, 2 aa, Artificial Sequence
  Synthetic
LN

SEQ ID NO: 151 - protein, 3 aa, Artificial Sequence
  Synthetic
KKV

SEQ ID NO: 152 - protein, 20 aa, Artificial Sequence
  Synthetic
VPVGPLVYEPNQDGEDEGYS

SEQ ID NO: 153 - protein, 9 aa, Artificial Sequence
  Synthetic
SIKNWLDKK

SEQ ID NO: 154 - protein, 4 aa, Artificial Sequence
  Synthetic
EPSS

SEQ ID NO: 155 - protein, 5 aa, Artificial Sequence
  Synthetic
TVFVS

SEQ ID NO: 156 - protein, 8 aa, Artificial Sequence
  Synthetic
FGSEYFPS

SEQ ID NO: 157 - protein, 14 aa, Artificial Sequence
  Synthetic
KEEMEEIAHGLEAS

SEQ ID NO: 158 - protein, 3 aa, Artificial Sequence
  Synthetic
EVH

SEQ ID NO: 159 - protein, 5 aa, Artificial Sequence
  Synthetic
FIWVV

SEQ ID NO: 160 - protein, 7 aa, Artificial Sequence
  Synthetic
RFPQGDN

SEQ ID NO: 161 - protein, 11 aa, Artificial Sequence
  Synthetic
TSAIEDALPKG

SEQ ID NO: 162 - protein, 5 aa, Artificial Sequence
  Synthetic
FLERV

SEQ ID NO: 163 - protein, 4 aa, Artificial Sequence
  Synthetic
GERG

SEQ ID NO: 164 - protein, 4 aa, Artificial Sequence
  Synthetic
MVVK

SEQ ID NO: 165 - protein, 4 aa, Artificial Sequence
  Synthetic
GWAP

SEQ ID NO: 166 - protein, 6 aa, Artificial Sequence
  Synthetic
QAKILK

SEQ ID NO: 167 - protein, 5 aa, Artificial Sequence
  Synthetic
HWSTG

SEQ ID NO: 168 - protein, 4 aa, Artificial Sequence
  Synthetic
GFVS

SEQ ID NO: 169 - protein, 3 aa, Artificial Sequence
  Synthetic
HCG

SEQ ID NO: 170 - protein, 10 aa, Artificial Sequence
  Synthetic
WNSVMESMMF

SEQ ID NO: 171 - protein, 3 aa, Artificial Sequence
  Synthetic
GVP

SEQ ID NO: 172 - protein, 4 aa, Artificial Sequence
  Synthetic
IIGV

SEQ ID NO: 173 - protein, 4 aa, Artificial Sequence
  Synthetic
PMHL

SEQ ID NO: 174 - protein, 12 aa, Artificial Sequence
  Synthetic
DQPFNAGLAEEA

SEQ ID NO: 175 - protein, 2 aa, Artificial Sequence
  Synthetic
GV

SEQ ID NO: 176 - protein, 3 aa, Artificial Sequence
  Synthetic
GVE

SEQ ID NO: 177 - protein, 10 aa, Artificial Sequence
  Synthetic
AKRDPDGKIQ

SEQ ID NO: 178 - protein, 13 aa, Artificial Sequence
  Synthetic
RDEVAKLIKEVVV

SEQ ID NO: 179 - protein, 1 aa, Artificial Sequence
  Synthetic
E

SEQ ID NO: 180 - protein, 21 aa, Artificial Sequence
  Synthetic
KTREDVRKKAREMSEILRSKG

SEQ ID NO: 181 - protein, 4 aa, Artificial Sequence
  Synthetic
EEKM

SEQ ID NO: 182 - protein, 11 aa, Artificial Sequence
  Synthetic
DEMVAAISLFL

SEQ ID NO: 183 - protein, 2 aa, Artificial Sequence
  Synthetic
KI

SEQ ID NO: 184 - DNA, 2271 bp, Artificial Sequence
  Synthetic
atgtggagattgaagattgcagaaggtggatccccatggttacgtaccacaaataaccatgttggtagacaaatctgggagttcgaccctaacttgggtactccagaacagataagagaagtcgaagaggctagagaaaacttttggaaaaatagattcgaacaaaagcactcttcagatttattgatgcgtatgcaatttgcccaagaaaactcttccaatgttgtcttgccacaagttaaggtcaaagatgaagacgaaattactaaggaagctgttaaatctaccttggaaagagctttatctttctactccgccgtccagacttcagacggtaactgggcttctgatttgggtggtcctatgtttttattgccaggtttggttatcgctttgtccgtcactggtgccttaaacgctgttttgtctaaggagcaccaaaaggaaatgtgcagatatttatacaaccatcaaaataaggatggtggttggggtttgcacattgagggtcactcaaccatgttcggtaccgttttgacatatgtcactttgagattgttgggtgaaggtgttgatgacggtgatggtgctatggaaagaggtagaaaatggacattagaacatggttccgcaactgctatcacctcttggggtaagatgtggttgtctgttttgggagtcttcgaatgggctggtaataatccaatgccaccagaaacctggttattgccatacatcttaccagtccaccctggtcgtatgtggtgtcattgtagaatggtttacttgcctatgtcatacttgtacggtaaaagatttgttggtccaattactccaacagttttatctttaagaagagaattgttcgacgttccatatcacgagatcgattgggaccgtgccagaaacgaatgtgctaaggaagatttatactatcctcacccattggtccaagacattttgtgggcctccttacataaggccgtcgagcctatattgatgagatggccaggtaaaaagttgcgtgaaaaggctttgtctactgtcatggaacacatacactacgaagacgaaaacaccagatatatttgtttgggtccagttaataaggtcttgaacttgttgtgctgttgggttgaagatccttattctgatgctttcaagttacatttgcaacgtgttcatgactacttgtgggttgccgaagacggtatgaagatgcaaggttacaacggttcccaattgtgggacactgctttttctatccaggctattttagcaaccaacttaggtgaggaatatggtggtacattgagaaaagcacacaatttcatcaaggattcacaaattcaagaagattgtccaggtgacccaaacgtttggtttagacatatccataagggtgcttggccattttccactcgtgatcacggttggttaatttcagactgcactgctgaaggtttgaaagcatccttgatgttatctaaattaccatccacaatggtcggtgaaccattggaagttaacagattgtgtgatgctgttaacgtcttgttgtctttacaaaatgataatggtggtttcgcctcatacgaattgaccagatcttacccatggttggaattgataaaccctgctgagactttcggtgacatcgtcattgactacccatacgttgaatgtacctctgcaactatggaagccttgaccttgttcaagaagttgcatcctggtcacagaaccaaggagatcgataactgcattaaaaaggctgctaaatttttggagaagatgcaaagagctgacggttcctggtatggttgttggggtgtctgttttacttatgcaggatggttcggtataaaaggtttggttgccgctggtagaacttacaattcctgtttggctattcgtaaggcttgcgaatttttgttatctaaggaattaccaggtggtggttggggtgaatcttacttatcctgtcaaaacaaggtctatactaatttggaaggtaataagcctcatttggttaacactgcctgggttttaatggctttgattgaagccggtcaggctaagagagatccaatgccattacacagagctgctaaagttttgatcaactctcaaatgccaaacggtgatttccctcagcaagaaattatgggtgtttttaaccgtaattgtatgatcacctatgctgcttacagaaatattttcccaacctgggctttgggtgaatacagaactcaagtcttacaaaagtaa

SEQ ID NO: 185 - DNA, 2286 bp, Artificial Sequence
  Synthetic
atgtggcgtttaaaaacaggttctgaaaccgtcggggataacggtagatggttgagatcaactaataaccacgttggtagacaagtttgggagttctttcctgaaatgggttccccagaagaattggtcgctatcgaagccgctcatagagaatttcacttgaatagattccataagcagcactcttccgacttattgatgcgtttgcaatatgagagagaaaagccatgtgttcaaaaggaaggtgcagttagattggacgctactgaaaccccaactgaagccgctgtcgaaaccacattaagacgtgctttaactttctactctaccatgcaatcagatgacggtaactgggcctctgatttgggtggtcctatgtttttgttgccaggtttagttatagctttgtacgtcactggtgtcttgaactccgttttgtccaaagaacatcaaagagaaattagaagatatttatacaatcaccaaaaccaagatggtggttggggtttacacatcgagggtccatctactatgttcggttctgctttgaactacgttaccttgcgtttattgggtgaaggtccagatgacggtgaaggtgcaatggaaagagccagacaatggattttatctcgtggtggtgcagttgctgttacctcctggggtaagttgtggttgtcagtcttgggggtctatgagtgggacggtaacaatcctttgccaccagaattgtggttgttaccatactctttgcctttacatccaggtagaatgtggtgccattgtagaatggtttacttgccaatgtcctatttatacggtaagagattcgttggtcctattactccaactgttttatctttgagagaggaattgtacccaatcccttatcaccatgttgactggaacaaagctagaaacacctgtgctcaggatgatttgtactacccacacccattcgtccaggacttattgtggggttctttatatcacgtctacgaaccattggttatgagatggccaggtaagagattgcgtgaaagagccttgcaacacgtcatgaagcatattcattacgaggatgaaaattctcgttacatctgtttgggtccagttaataaagctttaaacatgttatgctgttgggtcgaagacccacactctgaagcttttaagatgcatataccaagaatttatgactatttgtggatcgccgaagatggtatgagaatgcaaggttataatggttcccaattgtgggatactgctttttccgtccaagctattgtcgccactaagttgacagacgaattttcagagaccttagcaaaggctaacaaatacatcttggatgcccaaattttgaaaaactgtcctggtgatccaaatgtttggttcagacacatccacaagggtgcttggccattctctacaagagaccatggttggttgatctcagattgcactgctgaaggtttgaaggcatccttaatgttgtcaaaattaccttctaagattgttggtgaaccattagagaaaaacagattgtacgacgctgttaacgttttgttgtcattacaaaacgaaaatggtggttttgcttcttatgaattgacaagatcctacccatggttggaattgatcaatccagccgagaccttcggtgatattgttatagattatacctacgttgaatgtacctctgctacaatggaagctttaactttattcaagaagttacacccaggtcatcgtaagaaggaaattgaaagatgtatggctaacgctgccaaattcttggaaatgagacaagaggcagacgggtcttggtacggttgctggggtgtctgttacacatatgctggttggttcggtattaagggtttggttgcagctggtagaacttacaataattgtgcaaacatcagaagagcttgcgactttttgttgtcaaagcagttgccaaatggtggttggggtgagtcctacttgtcctgtcaaaacaaattatacactaacttgaacaatgacagaatgcacaccgtcaacaccgcctgggctatgatggccttgattgaagctggtcaagctaagactgatcctatgccattgcaccatgctgcacgtaccttgattaacgctcaaatggaaactggtgactttcctcaacaagaaataatgggtgtttttaataagaactgtatgatcacttatgctgcctatagaaacgttttcccagtctgggctttaggtgaataccaccaccgtgttttgaacggttgttaa

SEQ ID NO: 186 - DNA, 2286 bp, Artificial Sequence
  Synthetic
atgtggcgtctgaagacaggctctgagactgttggtgacaacggtagatggttacgcagtaccaataaccatgtcggaaggcaagtatgggaatttttccctgaaatgggttcccccgaagaacttgttgctattgaagccgcacacagagaatttcacctaaaccgtttccataaacagcactcttcagatttgctcatgagattacaatacgagagagaaaagccatgcgtccaaaaagaaggtgctgtgagattggatgctacggagactccaaccgaagcggctgtcgaaactacattgcgtagagccttgaccttctatagcactatgcaatctgacgatggtcactgggctaatgacttgggtggcccaatgtttcttttgccaggtttggttataaccttaactatcactggtacgattaacgttgttttatccaaggaacatcaaagagaaatcagacggtacctatataaccaccagaatcaagatggtggttggggtttgcatatcgaaggaccatcgaccatgttcggtagcgcgttgaactacgttacgttgaggctcctgggggagggtcctgacgacggtgaaggagctatggagagagccagacaatggattctgtccagaggtggtgctgtcgctgtaacctcttggggtaagttatggttgtcagttttgggtgtgtacgaatgggatggtaataacccgttgccaccggagctttggcttctaccttactctttaccattgcacccaggtcgaatgtggtgtcactgtagaatggtctatttgccaatgtcgtacttgtacggtaagagattcgtcggtcctattactccaactgttctttccttaagagaagaactctacccaatcccctatcatcatgtcgattggaacaaagctagaaatacatgtgcacaagacgacttgtattatccacacccatttgttcaagatctgctgtggggttctttgtaccacgtttatgaaccattagttatgagatggcccgggaagagattgcgagaaagagccttacagcacgtgatgaaacatatacactacgaagatgaaaacaccgaatacatttgtttaggaccagtgaataaggcattgaacatgttgtgttgctgggttgaagaccctcattctgaagctttcaagatgcacattccgcggatctatgattacctgtggatcgctgaagacggcatgaaaatgcaaggttacaacggcagtcaattgtgggatactgccttcgccgtccaagctatcgttgctacaaagttgactgacgaattttccgaaaccttggccaaagctaataagtacattttggacgctcaaatactgaagaactgtccaggtgatcctaatgtatggtacagacatattactaagggggcttggtctttttctaccgcggatcaaggttggcttgtttcagactgtaccgctgaaggtttgaaggcattattgttgtactctatgctcccacaccagaaagccccatccagcatcgaaaagaaccgtctttatgatgctgtaaacgttttactatctatgcaaaacgctgatggtggtttcgcttccttcgaacttacgcgtagttatccatggttggaaatgattaacccagccgaaacattcggtgacatagtcatcgattacacttacgtcgaatgtacctctgctgtgattcaagcattggctttgttcaagagattgcacccgggacacagaaagaaggaaatagagaggtgtatggctaacgcagctaaatttttggagatgagacaagaagccgatggctcatggtatggttgctggggtgtttgttatacatacgccggttggtttggtatcaaaggtctaacctcctgtggtagaacttacaataattgcgccaacattagaagagcttgcgactttttattgtcgaaacaactgccaaatggtggttggggcgagtcctacttgagctgtcaaaacaagttgtacaccaatttgaacaacgaccgtatgcacactgtcaatactgcttgggctatgatggcgttaattgaagctggtcaagccaagactgacccaatgcccctacatcatgctgctagaaccctaattaatgcacagatggagaccggcgactttccccaacaagaaatcatgggtgttttcaataagaattgtatgatctcttacgccggttatagaaacgttttcccagtatgggctttaggcgaataccatcacagagtgttgaacggttgttaa

SEQ ID NO: 187 - DNA, 2226 bp, Artificial Sequence
  Synthetic
atgtggcgtttgaagatcgcagagggtaaagaaggtccttacttaaagtcaacaaacaattttgttggaagacagacctgggaatttgacccagatgccggtactccagaagaaagagctgctgtcgaagaagccagacgtgctttctattctaacagatacagagttaaaccaccagctgatttgttatggagattgcaattcatgagagagaagaatttcaagcaaattattcctatggtcagaatcaaggacggtgaagctataactcacgaaaaagcaaccgccactttgagaagagccgttcatttcttgactgtcttacaatccatcgacggtcactggccagctgagaacgctggttgccattactttttgccaccattagttttttgtttgtatattacaggtcacttgtcttccgttttctctcaagaacatcaaagagaaattttgcgttacatctataatcaccaaaacgaagatggtggttggggtttacacatcgaaggtcactctattatgttctccaccgctttgtcttacatatgtttgcgtattttgggtgaaggtttagaaggtggtcaggacaacgcttgtgctaaggctcaaaaatggattttagatcatggttcagttactcacataccttcctggggtaagacctggttgtctgtcttgggtttgttcgattggtccggttcaaatccaatcccaccagaattttggatgttaccatcttttttacctattcatccaggtaagatttggtcatactgccgtactacatatatgccaatgtcctacttgtatggaaagaagttcgtcgctcctatcaccccattgattatccaattaagaaaagagttgtacttgcaaccatacgacgaaataaactggagaaaggttagacatttgtgtgcaaaggaagatttgtattacccacacccagttattcaagatttaatgtgggactgtttatacgtcttcactgaacctttgttgaatcgttggccattgaacaagatgatcagagaaaaagccttgaaggttaccatgaaccatattcactacgaagatgagaactcttcttatatcaatatggcttgtgtcggtaaagttttgtgtaccttggcttgctgggttgaagacccaaacggtgactacttcaaaaagcacttggccagaatcccagattacatttgggtcgctgaagatggtatgactatgcaaggtttggcctctcaaacttgggactccggtttagctatccaagcattgtttgcctccaacttgatagatgaaattggtccaactttaaagagagctcatgatttcatcaagaagtctcaagttttagacaatccttttggtgactttaaaaagatgttcagacactcctctaagggttcatggaccttctcagtcagagatcacggttggcctgtttctgactgtacagctgaaggtttgaaatgctgtttgttgttgtctatgttaccacaagagattgttggtgaaaagttagaagttgagagattgcatgatgctgtcaatatcattttccacttacaatccaagaacggtggtgtcgccgcatgggaacctgttagagcatccaaatggttggaattgttgaatccaatcgaatttttggaagatatagttgtcgaccatgagtatttagaatgtaccgcttcttctatagacgctttacagttatttaagaaattataccctacttgtgagcgtgaagaaattgaaaacttcatcttgaaggctgttgaatatatcgaaaacattcagatgtctgatggttcttggtatggtaactggggtgtctgcttcatctacggtacattgttcgctttgaagggtttagctaaggcaggtaagacttatgacgattgtgtcgctatgagaaaaggagttgattttttgttaagaatccaaagagacgatggtggttggggagagtcatacaagtcctgtccaaataaaaagtttgaaccattgcagagagaaggttccaacgtcgtccaaactgcttgggccattttaggtttgattgagtctcgtcaaattatgagagacccaaccccattgcacagagcaataaagttcatcatcaactctcaattagaagatggtgactttccacaacaggttagaggtttgtcctacatttattcatctttgtcctttttgccagttattaagatgtaa

SEQ ID NO: 188 - DNA, 2301 bp, Artificial Sequence
  Synthetic
atgtggcgtttaaagatcggtgccgacaccgtcttgacagatccatcaaatgcaggaggtagatggttgtctactttatccaaccatttgggtagacaggtttgggaattttgtgctgagttgggttctcctgaagacttgcaacaaatacaacacgctagacaaagattctccgatcacagattcgaaaaaaagcattctactgacttattgatgcgtatgcaatttgctaaggaaaactcatctttcgttaatttgccacaaattaaagtcaaggataaggaggatgttaccgaagaagccgtcactagaactttgaaaagagctattaacttctattctaccatccaggcacacgacggtaactgggcttccgacttaggtggtccaatgtttttgttgcctggtttagttattgctttgtacgttacaggtgttttgaactccgtcttgtctaccgaacatcaaagagaaatctgccgttacttatataatcaccaaaacagagatggtggatggggtttgcatatcgagggtccatctactatgtttggttccgtcttgaactacgttactttaagattattgggtgaagaagccgaagacggtcaaggtggtgtcgataaggctagaaagtggattttagatcacggtggtgctaccgccataacatcatggggtaagatgtggttgtctgttttaggtgtttacgaatgggcaggtaataatccattgccaccagaattgtggttgttaccatacttgttgccttgtcatccaggtagaatgtggtgtcactgtagaatggtctatttgccaatgtgttacttgtatggtaagcgtttcgttggtcctattacaccaattatcagatccttgagaaaagagttgtacttagttccttatcacgaagttgactggaacgtcgctagaaaccaatgcgctaaagaagatttgtactatccacatccattagtccaggatgtcttatgggcctctttgcatcacgtttacgaaccattgttcatgtgttggcctgctaagagattgagagagaaggcattaagaactgttatgcaacacatacactacgaagatgaaaattctcgttacatctgtttgggtccagtcaacaaagtcttgaacatgttgtgctgttgggttgaagacccacattccgaggctttcaagttgcatattcctcgtttgtatgactacttatggattgctgaagacggtatgagaatgcagggttacaatggatcacaattatgggatactgccttttctgtccaagctatcatgtctaccaaattgtcagaagaatacggtaccactttgagaaaggcccacaagtatattcaagattcacaagttcaagaagattgcccaggtgatccaaatgtttggtttagacatatacacaaaggtgcttggccattctccactagagaccatggttggttgatctctgactgtacagctgagggtttgaaggcctctttgatgttatctaagttgccttccaagatcgttggtgaaccattagaaaaggaaagattgtatgacgctgttaacgttttgttgtcattgcaaaacgaaaacggtggtttcgcctcctacgagttgaccagatcttatccatggttggaattaattaacccagctgaaaccttcggtgatattgttatagactacccatacgttgaatgtacttccgctgcaatccaggctttggctgcctttaagaaattgtacccaggtcacagatctaatgaaattggtaactctatagctaaagccgctgacttcattgaatcaatccaagcaacagatggttcttggtacggttcttggggtgtctgtttcacctacgctggttggtttggtattaagggtttagtcgctgctggtagaacttacaattcctgctcctctttgagaaaggcttgtgatttcttaatgtccaaggaattggcagccggtggttggggtgagtcctacttgtcctgtcaagataaggtttataccaacatcaaagatgatagaccacatttggtcaacactggttgggctatgttgtcattaatcgacgctggtcaagctgaaagagatcctacaccattgcaccgtgctgccagaatattgattaattcccaaatggaagacggtgactttccacaggaagagatcatgggtgttttcaacaagaattgtatgattacttatgcagcttatagaaacatctttccaatttgggcattaggtgaataccgttgcagagtcttacaagcctcttaa

SEQ ID NO: 189 - DNA, 2292 bp, Artificial Sequence
  Synthetic
atgtggaggctcaaagttggggcagaaagtgtaggagagaaggaagaaaaatggctaaagtccatatctaaccacttgggccgacaagtgtgggaattttgtgcgcatcagcctaccgcttcgccgaatcatcttcaacagattgacaatgcccgcaaccatttccgtaataatagatttcacagaaaacaatcatctgatttattcttagctatccaaaacgagaaggaaattgcaaatgtcacaaaaggtggtggtattaaagttaaggaggaagaggatgtcagaaaagaaacggtaaagaacactgttgaaagggccttgagcttttactcagctatacaaactaatgacggaaattgggcaagtgatctaggcggtccaatgttcctgttgccaggactggtaatcgctctatatgttacaggtgttttaaattccgtgttgagcaagcatcacagacaggagatgtgccggtatttatacaaccatcaaaacgaagatgggggatggggtctgcatatcgaagggacttcgaccatgtttggttctgcccttaattatgtggccttgagattattaggcgaggatgcggacggtggcgaaggcggtgctatgacaaaagcacgtagctggattctggatcgtggtggggcaacggctataacttcttggggaaaattgtggctttcagtgttaggagtctatgaatggtccggtaacaaccctttgcccccagaattttggctcttaccctactgtcttcctttccacccaggccggatgtggtgtcattgcagaatggtatatctaccgatgtcgtacttatatggtaaaaggtttgttggaccaatcacgcctatagtcttgagtttaaggaaggaactttatacaattccctaccatgaaatcgattggaatagatctcgaaatacttgcgctaaagaagacttgtactatccacatccgaagatgcaagatattttgtggggctcaatttatcacctgtatgaacctcttttcaccagatggcctggcaaacgcttaagggagaaagcactccaaatggctatgaagcacatacactacgaggatgaaaactctcgatatatatgtctcggtccagttaacaaagtcttaaatatgctatgttgttgggtggaggacccatacagtgacgcattcaaatttcatttgcaaagagttcctgattacctatgggtagcggaagatggaatgagaatgcagggttataatggctcccagctgtgggatacagcgttttctgtacaagccattatttcaactaaacttatagattcttttggtaccacattaaaaaaggcccatgatttcgttaaagactctcaaatccaacaagactgccctggggatccaaacgtctggttcagacatattcataagggggcttggcccttttccacccgggatcacggttggctaatttcagattgtacggctgaaggtttgaaggctagcttaatgctaagtaagttgcctagtaagattgtcggagaacccctcgaaaaatcgcgtttatgcgacgccgttaatgttctgttatcgttgcagaatgagaacggcggttttgcaagctacgaactcacgaggtcctatccatggctcgaactaatcaatccagctgagacatttggagatatagtgatagactatccgtatgtcgaatgtacctcagcaactatggaagcattgaccctcttcaaaaaacttcatccgggtcatagaactaaagaaattgacatcgcagttgctagagcggccaatttccttgaaaatatgcaaagaaccgacggttcatggtatgggtgctggggcgtatgttttacttacgctggatggttcggtataaaaggtttagtcgcagcgggtagaacatataatagttgtgtagctattcggaaagcctgtgattttttactttctaaggaattgcccggagggggttggggcgagtcctacttatcctgccagaacaaagtttatactaaccttgaaggcaatcgtcctcatctggttaacactgcatgggtgctgatggccttgatagaagctggccaggctgagcgtgatccagcaccattgcatcgtgcagcgaggttgttgattaattcgcaactagagaatggtgatttcccacaagaagaaataatgggagtgtttaacaagaactgtatgattacatacgctgcttaccgcaatattttcccgatctgggcactaggagagtattttcacagggtattaacagag

SEQ ID NO: 190 - DNA, 2292 bp, Artificial Sequence
  Synthetic
atgtggaggctcaaagttggggcagaaagtgtaggagagaaggaagaaaaatggctaaagtccatatctaaccacttgggccgacaagtgtgggaattttgtgcggaccagcctaccgcttcgccgaatcatcttcaacagattgataatgcccgcaaacatttccgtaacaatagatttcacagaaagcaatcatctgatttattcttagctatccaaaatgagaaagaaattgcaaacggtacaaaaggtggtggaattaaggtcaaagaggaagaggacgttagaaaggaaacggtgaaaaacactgttgaaagggccttgagcttttactcagctatacaaactaatgatggcaattgggcaagtgatctaggtggaccaatgttcctgttgccaggtctggtcatcgctctatatgtaacaggcgttttaaattccgtattgagcaagcatcatagacaggagatgtgccggtatttatacaatcaccaaaacgaagacgggggttggggactgcatatcgaagggacttcgaccatgtttggttctgcccttaattatgtggccttgagattattaggcgaggatgcggatggtggcgaaggtggtgctatgacaaaggcacgtgggtggattctggaccgtggaggggcaacggctataacttcttggggtaaattgtggctttcggtattaggagtttatgaatggtcaggcaacaaccctttgcccccagaattttggctcttaccctactgtcttcctttccacccaggtcggatgtggtgtcattgcagaatggtgtatctaccgatgtcatacttatatggtaaaaggtttgttggaccaatcacgcctatagtcttgtccttaaggaaggaactttatacaattccctaccatgaaatcgattggaacaaatctcgcaatacgtgtgctaaagaggatctatattatccacaccccaaaatgcaagatattttgtggggcagtatttaccatttatatgaacctctgttcactagatggccaggaaaacgcctgagagaaaaggcattgcagatggctatgaagcatatacactacgaagacgagaatagtagatacatttgcttgggtcctgtgaataaagttctgaacatgttgtgttgttgggtagaggatccgtacagtgacgcgtttaaattccatttacaaagagttccagactacctatggatagcagaagatgggatgagaatgcaaggttataatggctcgcagctatgggacacagctttttcagtccaagcaattatctctactaagctgattgattcttttggcaccactttgaaaaaggcacatgatttcgttaaagattctcagattcaacaggattttccaggtgacccgaatgtctggttccgacacatccacaagggtgcctggcccttttcaacccgagatcatggctggttgatatccgattgtacagccgaagggttaaaggcgagccttatgttaagcaagttaccttcgaaaattgtaggtgaaccattagaaaaaagtagactatgcgatgcagttaacgttcttttatcactacaaaatgaaaacgggggctttgctagctacgagttaaccaggtcatatccatggttggaattaataaaccctgccgaaacgttcggagacattgtgattgattatccatacgtagagtgtacctccgcaactatggaggctcttactctttttaagaaattacacccaggtcatcgtacaaaagagattgatacagcggtcgccaaggctgctaatttcctcgaaaatatgcaaagaaccgatggaagttggtacggatgctggggtgtctgttttacttatgccggttggtttgggattaagggtttggttgccgcagggcgcacatattccacttgcgtcgccatcagaaaagcttgtgatttcttgttgtcaaaagaattaccaggcggtggatggggtgaatcttatctatcttgtcaaaacaaagtctatactaatctcgaaggtaataggcctcatttggtgaatacagcttgggttctgatggccctcatcgaggctggtcaagcggaaagagatcccgcaccactacatcgtgctgcaaggctcttgatcaattcacaattagagaacggtgattttccgcaggaagaaatcatgggtgtattcaacaagaactgcatgataacctacgccgcttataggaatatttttcctatatgggctcttggagagtactttcatagagtgctaactgag

SEQ ID NO: 191 - DNA, 2295 bp, Artificial Sequence
  Synthetic
atgtggcgtttgaaggttggtgccgagtctgtcggcgaaaaagatgaaaagtgggttaaatccgtctcaaaccacttaggtagacaagtttgggaattttgcgcagacgctgccgctgatacccctcatcagttgttgcaaatccaaaatgctagaaaccacttccatcacaatagattccatagaaagcaatcttccgacttatttttggctattcaatacgaaaaggagattgctaagggtgccaaaggtggtgctgttaaggtcaaagaaggtgaagaagttggtaaggaagccgtcaagtctactttagagcgtgctttgggtttctattctgctgttcagacatcagacggtaactgggcttctgatttaggtggtccaatgtttttgttgccaggtttggttatcgcattacacgtcactggtgttttgaactccgtcttgtccaagcaccatagagttgaaatgtgtagatacttgtacaaccatcaaaatgaagatggtggttggggtttgcacatagaaggtacctctactatgttcggttctgctttgaattatgttgccttgagattgttaggtgaagacgcagacggtggtgatggtggcgctatgaccaaggctagagcatggatattagagagaggtggtgctacagctatcacttcatggggtaagttgtggttgtccgtcttaggtgtttacgaatggtccggtaacaacccattaccaccagaattttggttattgccttattctttgccattccatcctggtagaatgtggtgtcactgtagaatggtctacttaccaatgtcttatttgtacggtaagcgtttcgttggtccaattactccaaaagtcttgtctttgagacaagagttgtacaccattccatatcacgaaatcgattggaataaatcccgtaacacctgcgctaaggaagacttatactatcctcacccaaagatgcaagacattttgtggggttctatctaccatgtctacgaacctttgttcactagatggccaggtaaaagattgcgtgagaaggccttacaagcagctatgaaacatattcactatgaagatgaaaactcaagatacatctgtttgggtccagttaataaggttttaaacatgttatgttgttgggtcgaagacccatactccgatgccttcaagttgcacttgcagagagtccacgattacttgtgggttgctgaagacggtatgagaatgcaaggttacaatggttcccaattatgggataccgccttttctattcaagctatagtcgcaactaagttagttgattcttacgcacctactttgcgtaaggctcatgacttcgtcaaagactcacaaatccaagaagattgtcctggtgacccaaatgtttggtttagacacattcataagggtgcctggccattttccacaagagaccacggttggttgatttcagattgtacagctgaaggcttaaaggcttctttgatgttgtctaagttaccttccactatggttggtgagccattggaaaagaacagattgtgtgatgctgtcaacgttttattgtctttgcagaacgacaacggtggtttcgcttcttatgaattaaccagatcctacccatggttggaattgataaatccagctgaaactttcggtgacattgttatcgattacccatatgttgaatgcactgccgccaccatggaagctttgactttattcaaaaagttgcaccctggtcacagaacaaaggaaatcgataccgcaatcggtaaagctgctaacttcttagagaaaatgcaaagagccgatggttcttggtacggttgttggggtgtttgttttacttacgctggttggttcggtattaagggtttggttgcagctggtcgtacctataattcttgcttggctattagaaaggcctgtgaatttttgttgtccaaggaattgccaggtggtggttggggtgaatcttacttgtcctgtcaaaacaaagtctacaccaacttggagggtaacaagccacatttagtcaacaccgcttgggttttaatggctttgatcgaagctggtcaaggtgaaagagatccagctcctttgcatagagcagcccgtttgttaatgaactcccaattggaaaatggtgattttgttcaacaggaaataatgggcgttttcaataaaaactgtatgattacatatgctgcctatagaaatatcttcccaatttgggctttgggtgaatattgccacagagtcttaactgaataa

SEQ ID NO: 192 - DNA, 2322 bp, Artificial Sequence
  Synthetic
atgtggaggctcaaagttgggaaggaaagtgtaggagagaaggaagaaaaatggataaaatccatctctaaccacttgggccgacaagtgtgggaattttgtagcggtgagaatgaaaatgacgatgatgaggcaattgcggttgccaacaattcagcttctaagttcgaaaatgctcgtaaccattttcgcaataatagattccatagaaaacagtcgtccgacctatttttagcaattcaatgcgaaaaggaaatcattagaaacggtgccaaaaacgagggtacaaccaaggtcaaagaaggagaagatgtaaaaaaggaagcagtgaagaatacgctggaaagggctctttcgttttattcagcggttcaaacttcagatggcaattgggccagtgacctaggtggacctatgttcttattgccaggtttagttatagccttgtacgtcactggcgtacttaactcagttttgtctaaacaccatagacaggagatgtgtaggtatatttacaaccatcaaaatgaggatgggggttggggtttgcacatcgaaggttctagtacaatgtttggctctgctctcaattatgtcgctttaagacttttgggtgaggcagcagatggtggggaacatggggctatgactaaagcacgaagctggattttagaaagaggaggtgctaccgcgataacttcgtggggaaaactgtggctttccgtgttaggcgtttatgaatggtctggaaataatcccctaccaccggaattttggcttttaccttactccttgccattccatccgggtcggatgtggtgccactgtcgtatggtctacttgcctatgagctatctgtatgggaagcgcttcgttggaccaataacacctatcgtgctctcactcagaaaggaattatacacgattccctatcatgagattgattggaaccggagtcgaaatacctgcgccaaagaagatttatattatccacatccaaaaatgcaggacattttatgggggagtatctaccatgtatacgaacctctgttttctggttggcccggcaaacgtctaagggagaaggccatgaaaatcgctatggaacacatacactatgaagatgagaatagcagatacatttgtttgggacccgttaataaggtactgaacatgctatgttgctgggttgaagacccttattcagatgctttcaagtttcacctacaaagaatcccagactacctctggttggcagaagatggtatgaggatgcaaggatacaatggttcacaattgtgggatacagctttttcaatacaagctattatctcaacaaaattaattgacacatttggcccaactcttcgtaaagcgcatcatttcgtaaaacactctcagatacaagaagactgtcccggcgatccgaacgtttggtttagacatatccataaaggagcctggccattttccactagagatcatggttggctgatttcggactgcaccgcagaaggcctaaaagccagtcttatgctctctaagttgccttctaagatagtcggtgagcctttggaaaagaatagattatgtgacgccgtcaatgtgctgttgtctttacagaacgagaatggtggcttcgcaagctatgaattgactagaagctatccatggctggagctgattaaccctgctgaaacattcggcgatattgtcattgattatagttacgtagaatgtacctctgcgactatggaggcattagctttattcaaaaagttacatccaggacaccggacgaaagaaattgacgcagccatcgcgaaagccgctaatttcctagaaaacatgcaaaaaacagatggttcatggtatggttgttggggtgtgtgttttacctatgctggctggtttggtataaaaggtttagttgccgcaggtcgcacctataataattgcgttgctatacgtaaggcttgcaactttctattatccaaggaattgccgggtggcggatggggagaatcttatttgagttgtcaaaacaaagtttacactaacttagagggtaacaaaccgcaccttgtaaatacggcttgggtcatgatggcattaatcgaggcagggcagggtgaaagggacccagcccctttacatagagctgcaagattgttaattaacagtcaattagaaagtggtgatttcccacagcaggagattatgggcgtgtttaataaaaactgtatgatcacatacgccgcttacagaaacatatttcctatatgggcattaggggagtattcacatcgtgttcttgatatg

SEQ ID NO: 193 - DNA, 2172 bp, Artificial Sequence
  Synthetic
atgtggcgtttaaagttgggtaaaggagagaacgaagattacttgttttctaccaatgacttcatcggtagacaaacttgggaatttgatcctaacgctggtacaccacaggaaagagcccaagttgaagctgcaagattaaatttctatcaaaacagaaaccacgtccaatgttcatccgacttgttgtggagattccaatttttggaagagaagaacttcaaacaagctataccaaaggtcgttgttgaagaacgtaatggtaacgatagagaattatctattaagaaggagaccgttaagactgccttgagacgtgctactaacttctttgctgcattacaatccaatcatggtcactggccagctgaaaatgccggtccattgtactatttgcctccattggtcttcgctttgtacattactagagacttgaacaccatcttgtctaaagaacatcaaaaagaaattttaagatacgtttattgccaccaaaatgaggatggtggttggggtttgcacatcgcttctcgtcagtcatgtatgttatgtactgtcttgaactacattgaattaagattattgggtgaagaagctgataacgaagcatgctccagagccagaaagtggatattggaccatggtggtgctttgtacatcccatcttggggtaagatttggttgtctatcttgggtttatatgaatgggaaggtaccaaccctatgccaccagagatttggatgttcggtaagatattgccatggaacttgggtggtttgttatgttacacaagattaaccttattgccaatgtcctacttgtatggtaagagatttgttggtcctttgaccccattaatcttacagttgcgtcatgaaatttacactcaaccatataatgacatcaaatggtcaccagctagacacttgtgtgccaaggaagatgaatacttcgaaagatctattttccagaagttagtttgggacgtcgttacatacgtcggtgaaccaatcttgaagtcctgggcttttaagaaaattagaaatcgtgctatacaaatcgccaagtggtacatggactatgaggatcaaaactcacattacatcactattggttgtgttgaaaagcctttgtttactttgacatcttgggttgtcgatcctcacggtgaagcatataaaaagcatttagctagaataaaggactacttgtgggtcggtgaggacggtatgaagatgcaatcattcggttcccaatcttgggatgttgcatttgctattcaagctattttggctaccaacttacaccacgaattttctgaaactttaaaaaaaggtcacgacttcatcaaacaatctcaagttaagaagaatccatccggtgatttcccaagaatgtacagacatatctccaaaggttcttggaccttttcagatcaggatcacggttggggtgtctccgactgtgctgctgaaaacttgttgtgctgtttgaagttgtctactatgccttcccatattgttggtgattctatggaaccacaatgtttctttgaagccgttaatttcatattgtcattacaagccaaagacggtggtttgtctgcctgggaaccagctggaacattgcctttgtggtttgaagttttgaatcctgttgaatttttcgagtacactgttttggaaattgagtgtgtcgaatgtacttcctctgccattcaagctttggtcttgtttaagaagttgttcccatcccacagaaaaaaagaaattgataacttcatcgaaaaggccaccaattatattaaggaaatccaaaaggaggacggttcttggtatggtaactggggtatttgtcacatctacggtacttacttcgctataaaaggtttagctgctgctggaaatacttacgaaaattgctccaccgtcactaaggctgtcgatttcttgttgaagatccagtgtccagacggtggttggggtgaatctcatatctcttgcttgaacaaagtccatactccattaccaggtaacgcatctaacttggttcaaacctcattcgctttgatgtctttaatccactcccaacaagtctgtttttttttattcttcttcttcccatcatttttaccaatttgcactttgccttccttgataattatcttctaa

SEQ ID NO: 194 - DNA, 2298 bp, Artificial Sequence
  Synthetic
atgtggcgtttaaaggtcggtgctgacacagttccagccgatccttctaaatcaggcggttggttgtccactttgtctaatcatttgggtagacaggtttgggaattttgtgcagagttgggttccccagaagatttacaacaaatacaacacgctagacaacacttctctgaccatagattcgaaaagaagcactctgctgacttattgatgagaatgcaatttgccaaagaaaactcatcattcgtcaacttgccacaaatcaaggttaaggataaggaagatgtcatggaggaagctgttaccagaactttgaaacgtgctattaatttttactccaccatccaggccgatgacggtaactgggcatctgacttgggtggtcctatgttcttgttaccaggtttggtcattgctttgtatgttactggtgttttgaactctgttttgtccaccgaacatcaaagagaaatttgcagatacttatacaatcaccaaaacagagatggtggttggggtttacacatcgaaggtccatccaccatgttcggttctgttttaaattatgtcactttgagattattgggtgaggaagctgaagacggtgaaggtggtgttgacaaggccagaaaatggatcttagatcatggtggtgctacagctataacttcatggggtaagatgtggttgtccgtcttgggtgtctatgaatggaccggtaacaatccattaccacctgaattgtggttgttgccatacttgttaccagttcacccaggtagaatgtggtgtcattgtcgtatggtttacttaccaatgtgttacttgtatggtaagcgttttgtcggccctattaccccaattattagatctttgagaaaggaattgtacttggttccataccacgaggtcgattggaacgaagctagaaacttatgcgccaaagaggatttatattaccctcatcctttggtccaagacatcttgtgggcttctttacaccacgtttacgaaccattgttcatgagatggccagctaagcgtttgagagaaaaggcattaagaactgttatgcaacatattcactatgaagacgaaaattcccgttacatctgtttgggtccagtcaacaaagttttaaacatgttgtgttgttgggttgaggatcctcattctgaagccttcaagttgcacatcccaagagtctatgattacttgtggattgcagaggacggtatgagaatgcaaggttacaacggttctcagttatgggatactgctttctccgttcaagctataatttccacaaagttggctgaagaatacggtaccactttaagaaaggcccacgaatacatcaaagactctcaagtcttggaagactgtccaggtgaccctaacgtttggtttagacacatacacaagggtgcttggccattttcaactcgtgatcatggttggttgatttctgattgcaccgctgaaggtttgaaggcatcattgatgttgtctaaattgccatctaaaattgtcggtgaaccattagaaaaagaaagaatctatgattcagttaatgtcttattgtctttacagaatgagaacggtggtttcgcttcctatgagttgacaagatcctacccatggttggaattaattaacccagctgaaacttttggtgacatcgttatagactacccttacgttgaatgtacttccgccgctatccaagctttggccgcttttaagaagttatacccaggtcaccgttctaacgaaattggtaactgtatcgccaaggctgccgatttcattgaatccatccaagctaccgatggttcttggtatggctcttggggtgtttgtttcacatacgcaggttggttcggtattaagggtttggttgccgctggtagaacctacaacaattgcttgtcattgagaaaagcttgtgattttttgttatctaaagaattagccggtggtggttggggtgaatcctatttgtcctgccaagataaggtctacactaacattaaagatgacagacctcatattgtcaataccggttgggctatgttgtctttaatagaggttggtcaagctgaaagagacccaacaccattgcacagagccgcacgtatattgattaactcacaaatggacgacggtgattttcctcaagaagagatcatgggtgttttcaacaagaattgtatgatcacttacgcagcttacagaaacattttcccaatttgggctttaggtgaatacagatgtagagtcttgcaagctccataa

SEQ ID NO: 195 - DNA, 2358 bp, Artificial Sequence
  Synthetic
atgtggcgacttaaggtcggcaaagagtccgtgggagaaaaggaagaaaagtggataaaatcaatcagtaaccacctgggtcgtcaggtttgggaattttgtgccgagaatgacgatgacgatgacgatgaagcagttattcatgtcgtagctaacagctctaagcacctattacaacaacaaagaagacaatcttctttcgaaaacgctaggaagcaattcagaaataatagatttcatagaaaacaaagttccgatctcttcttgaccatccagtacgaaaaggaaattgctcgcaacggtgcgaagaacggtggtaatactaaggttaaagaaggtgaagacgtcaaaaaggaagctgttaacaatacgttggagagagccttgagcttctattcggctattcaaactggtgatggtaactgggcaagtgatttgggcggtccaatgttcttgttacctgggttggttatcgctttatacgtcacaggtgtgttgaactccgttctatctaagcaccatagacaagaaatgtgcagatatatctacaaccaccaaaatgaagacggtggatggggtttgcatattgaaggttcatctaccatgtttggtagtgcccttaactacgtagctttgcgtttattgggtgaagacgctaacggaggtgagtgtggtgcaatgactaaggctagatcctggatactggaaaggggtggggccacagctattacttcttggggtaagctctggttgtccgttctaggtgtctacgaatggtctggcaataatcccttaccaccggaattttggttgttaccatattctttgccattccacccaggtagaatgtggtgtcactgccggatggtctacttgcctatgagttatctatacgggaaaagatttgttggtccaattaccccaatggtgttgagcctaagaaaggagctttacaccattccctatcatgaagttgactggaacagatctcgtaacacttgtgcccaagaggatttgtactacccacacccaaagatgcaggacatcttatggggttccatttatcatgtttacgaaccgctattcaacggttggcctggtagaagattgagggaaaaagctatgaagatagcgatggaacacatccactatgaagatgagaactctcgttacatctgtttgggtccagtcaacaaagtcttgaacatgctgtgttgttgggtcgaagatccatactctgacgctttcaagtttcacctgcaacgaatccccgattatttgtggttagctgaagatggcatgagaatgcaaggttacaatggttcacaattgtgggacacggccttttccattcaagctatattatccactaaattgattgacaccttcggttccaccttgagaaaggctcatcattttgtgaagcattctcaaattcaagaagattgtccaggcgatccaaacgtttggttcagacacatccataagggtgcttggccgttctcaactagagaccacggttggctaatttcagactgtacagccgaaggacttaaggcgtctttaatgttgtctaaattgccttctaaaatcgttggtgaaccattggaaaagaatagattgtgcgacgctgttaatgtattgctttccttgcagaacgagaatggtgggttcgcttcttacgaattgactagatcctatccatggttagaactcattaaccccgcagaaaccttcggtgacatcgttattgattacagctatgtcgaatgtacgtcagccactatggaagctttggccctctttaagaaactccatccaggtcacagaacaaaggaaatcgacgctgctcttgccaaggcggctaacttcttagagaatatgcaaaggacggatggttcttggtacggttgctggggtgtgtgttttacctacgcaggttggttcggcatcaaggggctagtggctgctggtaggacttacaacaactgtgttgccatcagaaaggcttgtcatttcttgctaagtaaagagttgccaggtggtggttggggagaatcctacctcagttgccaaaataaggtttatactaacttagaaggaaacagaccacacctagtcaataccgcctgggtattgatggcattgatcgaagctggtcagggtgagagagatcctgctccactgcatcgcgccgctagattgttgattaactcgcaattagaaaacggtgattttccacaacaagaaattatgggtgttttcaacaaaaactgtatgattacttacgctgcttatcgaaatatatttccgatttgggccttaggtgaatactcgcaccgtgttttgactgaataa

SEQ ID NO: 196 - DNA, 2295 bp, Artificial Sequence
  Synthetic
atgtggcgtttaaaagtcggagccgagtcagttggcgaaaaggatgaaaagtgggtaaagtccgtgtctaatcacttgggtcggcaggtttgggaattttgtgctgacgcagacgctgtcaccccacatcaaagtctacaaatccacaacgctaggaaccatttccaccaaaatagattccgtagaaaacaatcctctgatctgtttttggcgattcaatacgaaaaggaaatagccaagggtgttaaagttggtgctgtcaaggttaaggagggtgaagaagttggtaaggaagctgtaaaatctactcttgaaagagcattatcgttctatagcgctgtccaaacgtcggatggtaactgggcctctgacttgggtggtcctatgttcctcttgccagggttggtcattgctttgtacgtcactggtgttttaaactccgttctatctaagcatcacagattggaaatgtgcagatatctttacaaccaccagaatgaagacggaggttgggggttgcatatcgagggtacatccaccatgtttggatcagctttaaattacgtggcattgagattgcttggtgaagatgctgacggtggtgatggtggtgccatgactaaggctagagcctggattttggaacgaggcggtgctaccgctattacttcttggggcaaattatggctgagtgttttgggtgtgtatgaatggtctggtaacaatcccctaccaccggaattttggttgctcccatactctctaccattccatcctggtagaatgtggtgtcactgtagaatggtttacttaccaatgtcctacttgtatggaaaaagattcgtcgggccaatcacccctaaggtcttgtccctaagacaagagttgtacaccgtaccataccatgaaatcgattggaacaaatctaggaacacatgtgcaaaggaggatttgtactatccacacccaaagatgcaagacatattatggggttcaatttatcatgtgtacgaacccttgtttactagatggcctggtaaaagattacgtgaaaaggctttgcaaactgcgatgaagcacatccactatgaagatgaaaacagcagatacatatgtttgggtccagttaataaggttctgaatatgttatgctgttgggttgaagacccatacagtgatgctttcaagttacacttgcaacgcgtccacgactatttgtgggtcgctgaagatggtatgagaatgcaaggttataacggttcgcaattgtgggacacagccttcagtattcaggcaatcgtcgctactaaacttgtcgattcatacggccccactctacgcaaggctcatgactttgttaaagattcacaaatccaagaagactgtccaggtgacccgaacgtttggtttcgacatattcacaagggtgcttggccattctctacaagagatcatggttggttaatttccgactgtactgccgaaggtttgaaagcgtctttgatgttgagtaagttaccatcaaccatggttggagaacctttggaaaagtctcgactatgcgatgcggtaaacgttctgttgtcccttcaaaatgataacggtggttttgcttcttacgaattgaccagatcgtacccatggcttgagctaattaatccagctgagacattcggtgatatcgtaatcgactacccatatgttgaatgtaccgcagccactatggaggctcttacgttattcaagaaattacatccgggccacagaactaaggaaattgacaccgctatcgctaaagccgctaattttttggaaaagatgcaaagaactgatggttcttggtatggttgttggggtgtttgtttcacttacgctggttggttcggaatcaagggtctcgtcgctgctggtcgtacatataactcctgcgtagccattagaaaagcttgcgaatttttgttatctaaggaacttccaggtggtggctggggcgagtcttacttgtcctgtcaaaacaaggtctacaccaatctcgaagggaacaagcctcacttggtcaacactgcatgggttttaatggccttgattgaagctggtcagggggagagagatccggctcccttacacagagccgccagattgttgatgaactcgcaattagaaaatggagacttcctccaacaagaaatcatgggggttttcaataaaaactgtatgataacgtacgccgcttacagaaacatattcccaatttgggcgttgggtgaatactgtcaccgcgtcttgacggaataa

SEQ ID NO: 197 - DNA, 2298 bp, Artificial Sequence
  Synthetic
atgtggcaattaaaggttggtgccgatacagtcccttccgacccatctaacgctgggcgttggttgtctaccttgaataaccatgttggtagacaggtctggcactttcacccagagttaggttcaccagaagatttgcaacaaatccaaaatgcaagacaacatttctacgaccacagattcgaaaaaaagcattcctctgacatattgatgagaatgcaatttgctaaagaaaactcttcattcgttaacttacctcaaattaaggttaaggaaaaggaagatgtcgttgaagaggctgttactcagactttgcgtagagccatgaatttctattccaccatccaggctgatgatggtcactggccaggtgactacggtggtccaatgtttttgttgccaggtttggtcattactttatctattactggtgctttgaacgccgttttatcaaccgaacatcaaagagaaatctgccgttatttgtacaatcaccaaaacagagatggtggttggggtttgcacattgaaggtccatccacaatgttcggttctgtcttgtcctacgttaccttgagattattgggtgaagaagctgaggacggtcaaggtggggtcgaaaacgcaagaaaatggatattggatcatggtggtgctacagctattacttcttggggtaagatgtggttatcagtcttgggtgtttatgagtgggctggtaataaccctttgccacctgaattgtggttattaccatacttattgccatttcacccaggtagaatgtggtgtcattgtagaatggtctacttaccaatgtgttatttgtacggtaagagattcgttggtcctatcactccaatcatcagatctttgagaaaagaattgtacttggtcccataccacgaaattgactggaacgaagccagaaatcaatgcgctaaggaggacttgtactatcctcatccattggttcaagacgttttgtgggcttccttgcaccacgtttacgaaccattattcatgagatggccagctaaacgtttacgtgaaaaggccttaagaaccgtcatgcaacacattcattacgaagatgaaaacaccagatatatctgtattggtcctgttaataaggttttgaacatgttgtgttgttgggttgaagacccacactctgaggcttttaagttacatataccacgtatttatgattacttatggttggcagaagatggtatgaagatgcaagggtacaatggttctcaattgtgggacactgccttcgcagtccaggctattatgtccacaaagttggttgaagaatatggtactactttgagaaaggcccacaaatacattaaagattcacaagtcttggaagattgtccaggtgacttgcaatcttggtacagacatatatccaagggtgcttggccattttctaccgctgatcatggttggcctatctccgattgtactgccgaaggtttgaaggctgttgtcttgttgtctaagttaccttccgagattgtcggtaaaccagttgacgaagagagaatgtacgacgccgttaacgttatcttatctttacagaacacagacggtggttttgctacctatgaattaaccagatcctatagatggttggaattgatgaacccagctgaaaccttcggtgatatagttatcgattacccatatgtcgaatgcacttccgcagcaattcaagctttagctgctttccgtaagttgtatccaggtcacagatctaatgagatcggtaactgcattgctaaagccgcagatttcatagaatctattcaagctactgacggttcttggtacggttcttggggtgtttgttttacctatggtggttggtttggtatcaaaggtttggttgccgctggtcgtagatacgaaaattcttcttcattgagaaaggcttgtgattacttattgtccaaggaattgccagccggtggttggggtgagtcatacttgtcatgtcaagacaaagtctacaccaatattaaggatgatagaccacacttagttaacaccgcttgggctatgttatcattgatcgacgcaggtcaagctgaaagagacccaactccattgcatagagccgccagaattttaatcaactcccagatggaagatggggatttccctcaagaagacatcatgggtgtctttaataaaaattgcatgatatcttattctgcttacagaaacatcttccctatttgggcattgggtgcttatcgttgtcgtgttttgttggcttcttaa

SEQ ID NO: 198 - DNA, 2298 bp, Artificial Sequence
  Synthetic
atgggtgaaatgtggaaattgaagttttctaagggttgggagacctcagaaaacgatcacgttgggcgtcaatattgggaatttgacactaatttaactccttccgaagaagaaaaggcacagatacaaaaattctacaacgaattttacaactatagattccaagccaagcattcttccgatttgttaatgagattccaattgagaaaggagaataacggtggtgaagtcaaattgccaacacaaatcaagattaccggtgaagaagagattaacgaagaagctatcgaaaagaccttaagacgtggtattagattctactctacattgcaaactcaagacggtttttggccaggtgactacggtggtccattgttcttgttgccagctttagttattggtttgtctgtcactaaggctttggatactgctatatcagttcaccatagacacgaaatgtgtagatacttatataatcatcagaacgaagacggtggttggggtttgcacatcgaaggtaattccactatgttgtgcaccgcattgtcttatgtctctttaagattattgggtgagaagatggatggtcgtgatggtgttttgttaaaagccagaagatggattttagacagaggtggtgctacatccatcccttcctgggggaagacttggttgtctgtcttgggtgtttacgaatgggaaggtaacaatccattgccaccagagatctggttgttaccatactcattacctttgcacccaggtagaatgtggtgtcactcaagaatggtttatttgccaatgtcttacttgtatggtaaacgtttcgtcggtcctatttctccaataatcatttctttgagaagagaattgtacacctgttcctaccatacaatcgactggaacttatctcgtaacttatgtgctaaagaagatttgtacaccccacattctaagattcaaaatatattgtggaactccatccacaagtttggtgagccattgttaaagaaatggccattgtccaaggttagacaaaaagccttggatttcgtcattcaacatatccattacgaagacgaaaacacccactacttgtgtttaggtcctatttctaaggttttaaatatggtttgctgttgggctgaagatcctaactcagaagcattcagaagacatatcccacgtattaaagattatttgtggttggctgaagacggtatgaagatgcagggttataacggttctcagttgtgggacgtcgtctttgctgttcaagccatcttagctactgatttagttgacgagtacggttctgttttgaagaaggcccacaacttcataaagaactctcaaatgaagagaaatgggattaaagaccaaaacaacccatccgtttggtatagacacatgtctaaaggtggttggccattctcaactcctgataacgcttggccagtctccgactgcacagctgaagctttgaaggcagctatcttgttgtcacaaatgcctactaccatggttggtgaaccaattgatgtccacaatttgtacgatgctgtcaacttgattttgtcattgcaaaactccaatggtggttttgcatcctacgaattgaccagatcctatccatggttggaaatgttaaacccagccgaaatatttggtgatgttatgatagactaccaatacgttgaatgtacttctgctgccattcaaggtttgaaagctttcatgaagttacacccaggttatcgtaagaaagacattcaaacttgtatctctaaggctgctcacttcattgaaactatccagttgccagatggttcctggtacggttcctggggtatctgctacacttacggtacctggtttggtattaagggtttggttgcctgtggtagaacctacgctaactctaaatgtatccgtaaggccacacaatttttgttgtctaaacaattgaagtcaggtggttggggtgaatcatacttgtctgctcatcacaaggtctatgcagatttaaaagacggtaagtctcacattgtcaatacctcttgggcattattagctttgattcaagccgaccaagctcaaagagatccatctcctttgcatagagctgccactgttttaattaattcacaaatggatgatggtgacttcccacaacaagaaatcatgggtgtttttaataagtcttgtatgatttcctatgctgcatacagaaatatcttcccaatctgggctttaggtgaatacagaatcagagttttacaattgcctgagaactaa

SEQ ID NO: 199 - DNA, 2301 bp, Artificial Sequence
  Synthetic
atgtggagattaaagattggtgccgacactgtaccatccgatcccagcaacgctgggggttggctgtcgaccctatcaaatcatcttggaaggcaggtgtgggagttttgcgctgaattgggttctccggaagatttgcaacaaatccaacaagcacgtcaaagattctctgaccacagattcgaaaaaaagcactccgctgacctcttgatgcggatgcaatttgccaaggaaaactctagtttcgtcaacttgcctcaggttaaagttaaggataaggaagaagtctctgaagaagctgtcacaagaactttgcgaagagcaattaatttctattccacgatacaagctgatgacggcaactgggcctcggatttaggtggtccaatgtttttgttaccaggtttggttatcgctctctacgttaccggcgttttaaattccgtgcttagtactgagcatcaaagagagatttgtagatacttgtacaaccaccaaaaccgtgatggtggttggggattgcacatcgaaggtccatctaccatgttcggttctgtgttgaactatgtcactcttagactactgggtgaagaagccgaagacggtcaaggtgctgttgacaaggctagaaaatggatattggatcatggtggggccgcggcgattacatcatggggtaagatgtggctatccgttctgggtgtctatgagtgggctggcaataatccattgcctccagaattgtggttattaccttacctcttgccatgtcacccaggtagaatgtggtgtcactgtagaatggtttacttgccaatgtgctacttgtatgggaaacgttttgtcggtccaatcaccccaattatccggtctttgagaaaggaactctacttggttccctaccatgaagttgattggaataaggcaagaaaccagtgtgctaaggaagatttatattacccacatcctctagtacaagacatcttgtgggcttctttacatcacgtctatgaacctttgttcatgcactggccagctaaaagacttagagaaaaggctttacaatcggttatgcaacacattcattacgaagatgaaaacagcaggtatatatgtctgggtccagtaaacaaagttttaaatatgttgtgctgttgggccgaagacccacattccgaagctttcaagttgcacattccgagaatttacgactacctatggatcgctgaggacggtatgagaatgcagggttacaacggttctcaattatgggacactgcgtttagcgtccaagctattatcagtacagaattggccgaagagtatgaaactacccttagaaaggcccataagtacataaaagattcacaagtcctagaggattgtccaggagatccaaacgtttggttcaggcacattcacaagggtgcatggcctttctctacaagagaccacggttggttaatttccgactgtaccgctgaaggtttgaaggcttctctcatgttatccaaattgccttcgaagatcgtaggagaaccactagaaaagcaacaactgtacaatgctgttaacgtgttgttatccttgcagaacgagaacggtggcttcgcatcttacgaactaactcgttcttacccatggttagaactaattaatcccgctgaaacgtttggtgacatcgtgattgattatccgtacgtcgaatgctcctctgctgcaatccaagctttggccgcctttaaaaaattgtacccagggcatagaagagacgaaatcaacaattgtattgccaaggctgctgatttcatcgaatctattcaggctactgatggtagttggtatggttcctggggtgtctgtttcacgtacgccggatggtttggtattaagggtctagtcgcggccggtcgcacttacaacaactgctcttcattacggaaggcttgtgatttcttgctaagtaaggagttggctgctggtggttggggtgaaagctatctctcttgtcaaaataaggtttacaccaacattaaggatgaccgcccacacatagttaatactggttgggctatgttgtcacttatagacgcagggcaatccgagagagatccaacccctttgcacagagctgcaagagttttgataaattcccaaatggaagatggtgattttccacaagaagaaatcatgggtgtttttaacaaaaactgtatgatcacatatgctgcctacagaaacattttcccaatatgggctttgggggaatacagatccagagttttaaaattattaaagtaa

SEQ ID NO: 200 - DNA, 2289 bp, Artificial Sequence
  Synthetic
atgtggcgtttgaagatcgctgacggtggcaacgatccttatatttactccacaaatgattttataggtagacagacttgggaatttgacccagaggccggtaccccagaagaaagacaagaagttgaagaagcaagacaccatttctacagaaaccgttataaagtcaagccatctgctgattgtttatggagaatgcaattcttgagagaaaagaaattcaagcaagagatcggtgctgtcaaaattaaggaaggtgaagaaatttctcaagacaaggccagaatcgctttacgtagagccgttcacttctactcagctttgcaagcttctgatggtcattggccagcagaaaatgctggtccattgttttttttacctccattggttatgtgcttgtacataactggtcacttagaccaagttttccctgaagaacataagaaagaaattttgagatacatctattgtcaccagaacgaggatggtggttggggtttgcatattgagggtcattccaccatgttctgtactgccttgtcctacatttgtatgagaatcttgggtgaaggtccagacggtggtttaaacaatgcttgtgctagaggtagaaagtggattttagatcacggttctgtcacctacatcccatcttggggtaagacctggttgtccattttgggtgtttacgactgggctggctcaaacccaatgccacctgaattttggttattgccatctttcttgccaatgcacccagccaagatgtggtgctattgtcgtatggtctatatgcctatgtcctacttgtatggtaaaagatttgtttgtcaaatcactcctttaattcaagaattgagattggagttacatgctcaaccattcgatgaaataaactggaagaaaactagacacttatgtacaaaagaagatgtttattacccacacccattgatgcaagatttgttgtgggactcattatacatttgtactgaacctttgttaaccagatggccattcaataagttggtcagagagaaggctttgcaagttacaatgaaacacatccattatgaagacgataactctcgttacatcaccatcggttgcgtcgaaaaggttttgtgcatgttagcatgttgggtcgaagatccagatggtgactacttcaagaaacacttggcacgtattcctgactacatttgggttgccgaggacggtatgaaaatgcagtcctttggttctcaagaatgggacactggtttcgctatccaagctttattggcagctgatatggctgacgaaataggtccagttttggctagaggtcatgattttattaagaagtctcaggtcaaggataatccatctggtaacttcaagaccatgcacagacatatatcaaaaggttcttggactttctccgaccaagatcacggttggcaagtctccgactgtaccgccgaagccttgaagtgctgtttgttgttctcattaatgagaccagaaattgtcggtgacaagatggaagctcaaagattgtatgactctgttaacgttttgttgtctttgcaatctaaaaatggtggtttggcagcttgggagcctgctactggtcaaaagtggttggaaatgttaaacccaacagaattttttgctgacattgttatcgaacacgagtacgtcgagtgtaccgcctcagctatccaagctttgatcttgttcaagaagttacatccaggccatagaactaaggaaattgataactttattcaaaatgctgtcagatacttgcaggatatccaaatgccagatggttcttggtacggtaactggggtgtttgtttcacctatggttgctggtttgccttaggtggtttagttgccgcagctaagacattcaataactgtgccgctataagaaaaggtgttcatttcttgttgaacattcaaatgccagatggtggttggggtgaatcctaccactgttgcccatctaagaagtatgtcccattggaaggtaagcgttcaaatttggttcacactgcctgggctatgatggccttgatccactctggtcaagctgaaagagatcctactccattgcatcgtgctgcaaagttattaattaattcccagacagaagatggtgatttccctcaacaagaaattaccggtgtttttatgaaaaactgtatgttgcactatgctgcatacagaaacatctacccattgtgggctttagctgaatactctaaaagagttaagttggcttcaacttctccataa

SEQ ID NO: 201 - DNA, 2289 bp, Artificial Sequence
  Synthetic
atgtggcgtttaaaagtcgcagacggtggcaacgatccatacatctattccatgaataactttgttggtagacaaatatgggaatttgaccctgatgctggttctccagacgagagagctgaagttgaaagagtcagaaatgaatttacaaagaaccgtttgaagggtttcccatcagccgatttgttatggagattgcagttgttaagagaaaaaaatttcaagcaatctattccacctgttaaggtcgaagacggtgaggaaattacctacgaaatggcctccgatgctatgaagagaggtgcttatttcttggaagcaatccaagcttctgatggtcactggccttccgagacttctggtccattgttctacttgtgtccattattgatttgcatgtacatcatgggtttcatggattcagctttttctccagaacataagaaagaaatgatgagatatttatacaaccaccaaaacgaagacggtggttggggtttgcatgttggtggtcactcaaacatgttctgtactaccttcaactacatttccttgagattgttaggtgaggaaccagatgttgaagccgtcgctaaaggtcgtatctggatcagagaccatggtggtgttacttctattttgtcctggggtaagacctggttgtctatattgaatttgttcgactggtctgcctctaatccaatgccacctgaatattggatgtttccaacatgggtccctattcacccatccaatatgatgtgttacactagaatcacctacatgccaatgtcatatttatatggtaagagatttcaagctccattgactccattagttttacaattgcgtgatgaattgcacactcaagcttacgaaaagattaactggagaaaggttagacacatgtgtgcaaccgaggacttgtacttcccacatccattcgttcaggacttattatgggatactttgtatatgttgtctgaacctttaatgacccgttggccatttaataaattgatcagacaaaaagctttggatgaaacaatgagacatattcattacgaggatgaaaactctcgttacataacaattggctgcgtcgaaaagccattgtgtatgttagcctgttgggtcgaagacccaaactctgaatatgttaaaaagcacttcgcaagaatacctgattacttgtggatggctgaagacggtatgaagatgcaatcctttggttcacaatcctgggatgccgctttggctatgcaggctttgttggcctgcaatatcactcacgatattggttcagctttgaacaacggtcacgaatttattaagaactctcaagttagaaataaccctccaggtgactacaagtccatgttcagatatatgtccaagggttcctggaccttctctgactgtgatcatggttggcaagtttcagactgtactgctgaaaatttaaaatgttgtttgttgttatccttgttgccacctgagatcgtcggtgaaaagatggagccacaaagattctacgatgctgttaacgtcatcttgaacatgcaatctaagaacggtggtttacctgcctgggaaccagcatcttcttactactggatggaatggttgaacccagtcgaatttttagaagatttgatcattgaacaccaacatgttgaatgtacctcttcagctttgcaggctattttattgttcagaaaacaataccctgagcacagaaagaaggaaatcaataacttcattaacaaggcagtccaatttttgcaggacatacaattgccagatggttcctggtatggtaactggggtatctgctacacctacggtacttggttcgctttgaaagctttgtcaatggcaggtaagacatatgagaactgtgaagctttgcgtaaaggtgccaattttttaattaagatccaaaacccagaaggtggtttcggtgaatcctatttatcttgtccatataaaagatacattccattagacggtaaaagatctaacttggttcaaactgcttggggtatgatgggcttaatcgccgctggtcaagctgatgttgatccaggtccaatacacagagcagccaagttattaatcaactcccaaactgaagatggtgacttccctcaagaagagattactggtgaattttttaagaactgcacattgcatttcgctgctttcagagaagtcttccctgtcatggctttgggtgaatactgtaataaggttccattgccatctaaaaaaaataccatcaattaa

SEQ ID NO: 202 - DNA, 2280 bp, Artificial Sequence
  Synthetic
atgtggcgtttaaaggttgcagatggtggcaatgacccttatatctactccatgtctaaccacttgggtagacaggtctgggaattttgtgctgacgctggttcaccagatgagagagccgaagttgaaagagtcagaaacgaatttactaaaaacagattgaagggtttcccatctgctgatttattgtggagattgcaattgttacgtgaaaaaaatttcaagcaatccattccaccagttaaggtcgaagacggtgaggaaataacatacgaaatggcctcagatgctatgaagagaggtgcttatttcttggaagcaattcaagcttctgatggtaactgggcctctgacttgggtggtcctatgttcttgttgccaggtttggttatcgctttatacgttaccggtgtcttgaactccgctttttctccagaacataagaaagaaatgatgagatacttatataatcaccaaaacgaggacggtggttggggtttgcatgttggtggtcactctaacatgttctgcactacctttaattacatttccttaagattgttgggtgaagaaccagatgtcgaagccgttgctaagggtagaatttggatccgtgatcatggtggtgttacttcaatcttgtcttggggcaaaacatggttgtctatattaaacttgttcgactggtccgcctcaaacccaatgccacctgaatattggatgttccctacctgggtcccaattcacccatctaatatgatgtgttacaccagaatcacttacatgccaatgtcctacttatatggcaagcgttttcaagctccattgactcctttagttttgcaattaagagacgaattacacacccaggcctacgagaagattaattggagaaaggttagacatatgtgtgctactgaggatttgtatttccctcacccattcgttcaagacttgttgtgggatacattgtacatgttatctgaaccattgatgactagatggccatttaacaaattgatcagacaaaaggctttggacgaaaccatgagacacattcattacgaagatgaaaactctcgttatatttgtttgggtccagtcgaaaaaccattgtgcatgttggcatgttgggtcgaggatccaaattccgaatacgtcaagaagcatttcgctcgtataccagactacttatggatggccgaagacggtatgagaatgcaaggttacaacggttctcagttgtgggatacagctttctcccaagcattattggcttgtaacataactcacgatatcggttcagctttgaataatggtcacgaatttattaaaaattcacaagttagaaacaaccctccaggtgatccaaacgtttggttcagacatatccacaaaggtgcttggccattctctactagagatcacggttggttgatctctgactgtaccgccgaaggcttaaaggcctccttgatgttgtccaagttgccttctaagattgttggtgagccattagaaaagtacgacgccgttaacgttttgttatcattacaaaatgaaaacggtggttttgcttcctatgaattgactcgttcctacccatggttggagttaatcaacccagctgaaacattcggtgatatcgtcattgactaccaacatgtcgaatgcacctcctctgctttgcaggcaatattattatttagaaagcaatatcctgaacacagaaagaaagagatcaataactttattaataaggccgttcaatttttacaagacattcaattgcctgatggttcttggtacggtaactggggtatttgttacacttatgctggttggttcggtattaagggtttggtcgctgctggtagaacctacaacaactgtgaagcattgagaaaaggtgccaatttcttgattaagatacaaaacccagaaggtggttttggtgaatcttatttgtcttgtccatataagagatacatccctttagacggtaagagatcaaacttggtccaaaccgcttggggtatgatgggtttgattgctgctggtcaagcagatgttgatccaggtcctatacatagagctgctaaattattaatcaattctcaaactgaagacggtgatttcccacaagaagaaatcatgggtgtcttcaacaagaactgcatgattacctacgcagctttcagagaagtttttccagttatggctttgggcgagtattgtaataaagttccattgccatctaagaagaacactattaattaa

SEQ ID NO: 203 - DNA, 2358 bp, Artificial Sequence
  Synthetic
atgtggcgtttaaaagtcggtaaggaatccgttggcgagaaggaagaaaagtggattaaatcaatatctaaccatttgggtagacaagtttgggaattttgtgcagagaatgacgatgatgacgacgatgaagctgtcatccacgttgtcgctaactcttccaagcacttgttacagcaacaaagaagacaatcttctttcgaaaatgccagaaaacaattcagaaacaatcgttttcatagaaagcaatcctctgatttgttcttgaccattcagtacgaaaaggaaatcgccagaaacggtgctaagaacggtggtaacactaaggttaaagaaggtgaagacgttaagaaggaggctgtcaataacacattggaaagagctttatcattctattcagcaattcaaacttctgatggtaattgggcttccgacttgggtggtcctatgtttttattgccaggtttggtcatcgccttatacgttaccggtgttttgaactctgtcttgtccaagcaccacagacaagaaatgtgccgttatatttacaatcatcaaaacgaggacggtggttggggtttacatatcgaaggttcatccaccatgttcggttctgctttgaactatgttgcattgagattattgggtgaagatgctaatggtggtgaatgtggtgccatgactaaggctagatcttggatcttggaaagaggcggtgccacagctattacttcatggggtaaattgtggttgtctgttttgggtgtctacgaatggtctggtaataacccattaccacctgaattttggttgttaccatactccttgccattccacccaggtcgtatgtggtgtcattgcagaatggtttacttgccaatgtcttatttgtacggtaaaagattcgttggtcctataacccacatggtcttgtctttaagaaaagaattgtacactataccataccatgaaattgactggaaccgttccagaaacacttgtgctcaggaggatttgtattacccacacccaaagatgcaagatatcttgtggggttccatttaccacgtctatgagcctttgtttaatggctggccaggtagaagattacgtgaaaaggccatgaagattgctatggaacacatccattacgaagacgagaactcaagatacatttgtttaggtcctgttaacaaggttttaaacatgttgtgttgttgggttgaagatccatactctgatgctttcaagtttcacttacaaagaatcccagattatttgtggttggctgaagatggtatgagaatgcaaggttacaatggttcccaattgtgggacactgctttttctatccaagcaattttatctaccaaattgatcgatacattcggttccaccttgagaaaagcccaccatttcgtcaagcactcacaaatccaagaagactgtccaggtgatccaaatgtttggtttagacatattcataagggtgcttggccattctccaccagagaccacggttggttaatatctgactgtaccgctgaaggtttaaaggcctctttgatgttgtctaagttgccatctaaaatagttggtgaaccattggagaagaacagattgtgcgacgcagttaacgtcttgttgtccttgcaaaatgaaaatggtggtttcgcttcctatgaattaactagatcttatccatggttggaattaattaacccagccgaaacttttggtgatatcgttattgactactcttacgtcgaatgtacatcagctactatggaggctttagctttatttaagaaattgcacccaggtcatagaaccaaagagattgacgctgccttggctaaggctgctaacttcttagaaaacatgcaaagaaccgatggttcttggtacggttgctggggtgtctgtttcacttatgctggttggtttggtattaagggtttggtcgccgctggtcgtacttataataattgtgttgcaattcgtaaagcatgtcacttcttgttgtctaaggaattgcctggtggtggttggggtgaatcctacttatcctgtcaaaacaaggtttatacaaacttggaaggtaatagacctcacttagttaataccgcctgggtcttgatggcattgatcgaagctggtcagggtgagcgtgatcctgccccattacatagagctgccagattgttgattaactcccaattggaaaacggtgattttccacagcaagaaattatgggcgtcttcaacaaaaactgtatgataacatacgccgcttacagaaacatatttccaatctgggctttaggtgaatattcacacagagtcttgactgaataa

SEQ ID NO: 204 - DNA, 2277 bp, Artificial Sequence
  Synthetic
atgtggaggttgaaggtagctgatggcggaaatgacccctacatagactcaacaaacaactttgtgggtcgtcaaatctgggagttcgatcctgattatggtactccggacgaacgcgccgaagtcgaagctgcaagagaaaacttctggaaaaatagatttcaggttaagttatctagtgaccttctatggagaatgcaattcgctagagaaaacccatgcgttaccaatttgccacaaattaaggtccaagatttggaggaagtgacggaagaagtcgtaaccactactctgaggagaggtttgaacttctactccaccattcaagcgcatgacggtcactggcctggtgattgtggtgggccaatgtttctattaccaggtttggttatcactttgtatgttactggtgccttacacgtcgttctttcgatcgagcaacagagagaaatgtgtagatacttgtgtaaccatcaaaacgaagatggtggttggggattgcacattgaaggcccatctaccatgtttggtacagttttgaattacgttaccctcagattattgggagaagctgacttcggtgctaaaggtgccatggaaaagggtcaaaagtggattctggatcatggcggtgctactgctattacgagctggggtaagatgtggttgtctgtcttaggtgcatatgaatggttcgggaccaacccattgcctccagaaatgtggttatgtccatacatccttccagttcacccgggtagaatgtggtgccattgtcgtatggtgtatttgcccatgtcctacttatacggtaaaaagttcgtcggcccaataaccagcactattatctcgcttcgtaaggaattgtacatcgttccatatcacgaagttgactggaatcaagctagaaatcagtgtgccaaagaggacttatattacccacacccattggtccaagatattttgtgggctagtttacataaggttttggagcctattcttggtcactggccaggtaacaatctaagagaaaaggccttatgtactgtgatgcaacacgttcattacgaagacgaaaacactagatacatttgcttgggccctgtcaacaaagtactaaacatgttgtgttgttggatcgaagatccaaactccgaagcttttaagttgcacataccaagaatcttcgattacctgtggatagctgaagatggtatgaaaatgcaaggttactctggttcacaattatgggacacgtcctttgctgttcaagctatcatttctactaatctaggtgaagaatatggtttgaccttgcgcaaggcacacgaatttattaagaactctcaggtcctggaggattgccctggtgacttgaagttctggtacagacacatctctaaaggggcatggccattctccacagccgaccaaggttggcctatctctgactgtacggctgagggcttgaaagccgtattattgctgagtaagcttccagttgaaaccgtcggggaaccattggatatgaagcatttgtcagatgctgttaatgtcattctatccttgcaaaatgcggatggtggtttcgctacttacgagcttactagatcttatcgttgggttgaactcattaaccctgccgaaacattcggcgacatagttatcgattacccatacgtggaatgtacctcggctgctatacaagccctcacttctttcaagaagctatatccggaacatagaagacatgaaattgaaaactgcatttctaaagctgcgaaatttattgaagaaatccaggctccagacggatcttggtatggttgttggggtgtctgttttacctatggtggttggttcggtatcaccggtttgattgctgccggtaatacatactccaattgtccatgtatcagaaaggcgtgtgattacttgttgagcaaggaattagcctcaggtggttggggtgaatcatacttatcctgtcaaaacaaggtctacacaaacctccctggagataagccacatatagttaacactgcttgggctatgctagctttgattgaagcaggacaagctggtcgtgacccgaatccattacacagagcagctcgaatcttgatcaatagtcaaatgaagaacggcgattttccccaagaagaaatcatgggagtgtttaacaaaaactgcatgattaactactctgcctatcgaaatatatttccaatctgggctctaggtgagcacagaagtagggtcttgcattcgtcctaa

SEQ ID NO: 205 - DNA, 2361 bp, Artificial Sequence
  Synthetic
atgggtaatatcaaggaacgtaaaggaaaggatagagagagacaaagagaaatgtggaagttaaaaataggtggtgaatccgtcggtaagaacaacgaagaaaaatggttgaagtcaatttctaatcacttgggtagacaggtttgggaattttgcccaaagttagaaaccgagactgaaacagagactgaatctcaaattgaaaacgcccgtaacaccttccatttgaacagattccacaaaaagcaatcctctgacttgtttatcactttgcaatatggtaatgaaattgctaaaatcgaaggtgttaagattaaggaaaaggaagaagtcagagaggaagctgttaaaactacattggagagagcattaaatttctactccgccatccaaacctcagacggtcattgggcttctgatttgggtggtcctatgttcttgttaccaggtttggttattactttgtacgtcaccggtgttttaaactccgtcttgtctaagcaccatagacaggaaatatgtagatatttgtacaaccaccaaaatgaagatggtggttggggtttacatatcgaaggtccatctactatgtttggttctgttttgaactacgtcgctttacgtttgttggctcaagactccgagtacgattccattttgaaaggtagaagatggatcttggaccacggtggtgcaacaggtattacctcatggggtaagttatggttgtccgttttaggtgtttatgaatggtgtggtaacaatccattgccacctgaattttggatcttgccatacttcttgccattccaccctggaagaatgtggtgtcactgccgtatggtttatttgccaatgtcttacttgtacggtaagagattcgtcggtccaattacccctactgtcttatctttgagaaaggaattatatacagtcccatatcatgaaattgactggaacaaatcccgtaatacttgtgctaaggaggatttatactacccacatcctaaaatacaagacatcttgtgggcttctttacatcacgtttacgaaccattctttaccagatggccaggtaagagattgagagataaggccttgcacgccgctatgcaacacatccattatgaagatgaaaatactagatatatttgtttgggtccagttaacaaagttttgaacatgttgtgttgttgggtcgaagaccctcactcagacgcttttaagtttcatttgcaacgtgtttacgattacttatgggttgctgaagatggtatgaagatgcaaggttacaatggttcacaattgtgggatactgctttctctgtccaagcaatcatctctaccaagttgactgaaaacttcggtccaacattaagaaaggcccataatttcattaagttgtcccagattcaacaagactgtccaggtgatccaaacatttggtatagacacatccataagggtgcttggcctttctctactgctgatcacggttggttaatttctgattgcaccgccgagggtttaaaggcatctttattattgtccaaagtctcttccaacacagttggtgaaccattggaacgtaacagattatttgacgctgtcaacgttttgttgtctttgcaaaacaagaatggtggtatagcctcatacgagttgactagatcttatccatggttagaattgatcaatcctgctgaaacctttggtgacattgttatcgactacccatatgttgaatgcacttctgctaccattgaagcattggctttgttcaaaaagttgtacccaggtcacagaaccaaggaaattgacaacgtcatagctaaggccgctaaattcttagaagatatgcaaagagaagatggttcttggtacggttgttggggagtttgttttacatacgcaggttggttcggtatcaagggtttggttgctgctggtagacaatataataattccccaaccattcgtaaggcatgtaacttcatattgtccaaagagttgccaggtggtgttggtggttggggtgagtcatacttgtcatgccagaacaaagtctacaccaatttggatggtaacagaccacatttggttaacacatcctgggctttgatggctttgatcgaagctggtcaggccgaccgtgacccaacccctttacatagagctgccagattgttgatcaactcccaattggaaaacggtgactttccacaacaagaaattatgggtgtcttcaacaagaattgtatgatcacttacgccgcttacagaaacatttttccaatctgggccttaggtgaatactgtcacagagtcttgaaccagcacagatcttctccattgttttaa

SEQ ID NO: 206 - DNA, 2310 bp, Artificial Sequence
  Synthetic
atgtggaagctaaaaattggtggcgaatctgttggtaagaacaatgaggaaaaatggcttaagtcgataagcaaccatctgggtcgacaggtgtgggaattttgtcctaagttagaaacagaaaccgaaactgagacggaatcccaaatcgaaaatgcccgtaacaccttccacctcaacagattccacaagaaacaatcatccgacttgttcatcacattgcaatacggaaatgagattgctaagattgaaggtgtcaaaatcaaggaaaaggaagaagtaagggaagaagcagttaagactactttggaaagagctttaaacttttatagtgctatacaaacttctgatggtcattgggcctctgatttagggggtcccatgttcttgttgccaggtttggtcattaccctgtacgttaccggtgttttaaatagtgtcttgtctaaacaccacagacaagaaatctgccgctacttgtataaccatcaaaatgaggacggcggttggggtttgcacattgaaggtccatccactatgtttgggtctgttctcaactacgtggctcttagattgttagctcaggactccgaatatgattcgattctaaagggtcggagatggatccttgatcacggtggtgcaacaggcatcacttcttggggaaagttatggttgtcagttttgggtgtctacgaatggtgtgggaacaacccactacctccagaattttggatcttaccatatttcttgcccttccatccaggtcggatgtggtgtcattgccgtatggtttacctgccaatgtcctacttgtacggtaaaagattcgtaggtccaattactcctaccgtcctatctttgagaaaggaactctatacggtgccataccacgagattgactggaataagtcaagaaacacctgtgccaaagaggacctgtactatccacacccgaagattcaagatattttgtgggcttccctgcatcatgtttacgaaccattttttaccagatggcctggtaaaagattgcgtgacaaggctcttcacgccgctatgcaacatatccactacgaagatgagaatactagatatatatgtttgggtccagtcaacaaagttctaaacatgttgtgttgttgggttgaagatccccattcggatgcgttcaagttccacttacaaagagtctacgactatctgtgggtcgctgaagacggtatgaagatgcaaggttataatggaagccaattgtgggacaccgcatttagtgtacaggctataatttctaccaagctcactgaaaattttggcccgactttaagaaaggcgcacaacttcatcaagttgtcacaaattcaacaagattgtccaggtgatccaaatatttggtacagacatatccacaagggtgcctggccgttctctaccgctgatcacggttggcttatctccgattgcacggctgaaggtttgaaagcttctctattgttgtctaaagtttcgtctaacacagttggggaacctttagagagaaaccgcttatttgacgctgtcaatgttttgttgtccttgcaaaacaagaacggtggaatagcttcctacgaattgactagaagctacccatggcttgaattgatcaatccagccgaaacattcggtgacattgtcattgattacccatacgttgaatgtacctcagctactatagaagctttggcccttttcaagaagttgtatcctggtcaccgaactaaggagattgacaatgtcatcgcgaaggccgctaaattcttggaagatatgcaaagagaagacggttcatggtacggatgctggggtgtgtgttttacgtatgcaggttggtttggtattaagggtttagttgctgccggtagacagtataacaactctccaactataagaaaggcttgtaatttcatcttaagtaaagagttgccaggtggtgtcggcggttggggtgaatcttatctgtcttgtcaaaacaaggtatacaccaacctagacggtaaccgtccacatttagtcaacaccagttgggctttgatggccctaattgaagctgggcaggctgaccgagaccccactccactccacagagcggcaagactgttgatcaatagtcaattagaaaatggtgatttcccacaacaagagattatgggtgttttcaacaagaactgcatgattacttacgctgcttacagaaatatcttccccatttgggcgcttggcgaatactgtcatagagttttaaaccaacaccgctcctctccactcttctaa

SEQ ID NO: 207 - DNA, 2280 bp, Artificial Sequence
  Synthetic
atgtggcgtttaaaggttggtgccgaatctgtcggagagaacgatgaaaaatggttgaagtcaatttccaatcatttgggtagacaagtttgggaattttgccctgacgctggtactcagcaacaattgttacaagtccacaaggctagaaaagcattccacgatgacagattccatagaaagcaatcctctgacttgtttatcaccatacaatacggtaaagaagttgaaaacggtggtaagacagctggtgtcaagttgaaagaaggtgaagaggttcgtaaggaagccgttgagtcttctttagaaagagcattgtccttctattcctcaatccaaacttcagatggtaactgggcttctgatttgggtggtccaatgttcttgttgccaggtttggttattgctttatacgtcactggtgtcttaaattccgttttgtctaaacaccatagacaagagatgtgtagatatgtttacaaccaccaaaatgaagacggtggttggggtttgcacattgaaggtccatctaccatgtttggttcagccttaaactacgttgctttgagattgttgggtgaagatgctaacgctggtgcaatgccaaaggctcgtgcctggatcttggaccatggaggtgctactggtataacctcttggggtaagttatggttatccgtcttgggtgtctatgaatggtctggtaataaccctttgccaccagaattttggttattcccatacttcttaccattccacccaggtagaatgtggtgtcattgtagaatggtctatttgcctatgtcttacttgtacggtaagagatttgttggtccaatcacacctattgttttatctttgagaaaggaattatacgccgtcccatatcacgaaattgattggaataaatcaagaaacacctgtgctaaggaggacttgtactaccctcatccaaaaatgcaggatattttgtggggttccttgcaccatgtttatgaaccattattcactcgttggcctgctaagagattgcgtgaaaaggccttgcaaactgctatgcaacacatccactacgaagatgaaaacactagatacatctgtttgggtccagtcaataaggtcttgaacttgttatgctgttgggttgaagacccatactccgacgcttttaaattacacttgcaaagagttcatgattacttatgggttgctgaggatggtatgaagatgcagggttataacggttctcaattgtgggacaccgcattttcaatacaggctattgtctctactaagttagtcgataattatggtccaaccttgagaaaggctcatgacttcgttaagtcctcccaaatccaacaagattgtccaggtgacccaaacgtctggtacagacacattcataaaggtgcttggcctttctctactcgtgatcatggttggttaatctccgattgcaccgctgaaggtttgaaggcagccttgatgttgtccaagttaccatctgaaactgttggtgaatctttggaaagaaacagattgtgtgacgccgttaatgttttgttgtccttacaaaacgataatggtggatttgcctcttacgaattaacaagatcatacccatggttggagttgattaacccagctgaaacattcggtgatatcgtcattgattatccatacgtcgaatgcacctctgctaccatggaagctttgactttgtttaaaaagttgcacccaggtcatagaaccaaggaaattgacactgctattgttagagcagctaacttcttggaaaacatgcaacgtactgacggttcttggtacggttgttggggtgtttgttttacatacgccggttggttcggtatcaagggtttggttgccgcaggtagaacctacaacaattgtttggctataagaaaagcttgtgacttcttgttatccaaggaattgccaggtggtggttggggtgaatcatacttgtcctgtcaaaataaggtttatactaatttggaaggtaacagacctcacttggttaataccgcctgggtcttaatggctttgatagaagctggtcaagctgaaagagacccaactcctttacaccgtgctgcaagattgttgatcaactcacagttagaaaatggtgattttcctcaacaagagataatgggtgttttcaacaagaattgcatgattacctatgccgcttatcgtaacatcttcccaatttgggcattaggtgagtactgtcatcgtgttttaacagagtaa

SEQ ID NO: 208 - DNA, 2298 bp, Artificial Sequence
  Synthetic
atgtggagattaaaagttggtgctgatacagtcccagccgacccttccaatgctggaggttggttgtcaactttgtctaaccacttgggtcgtcaagtttgggaattttgcgcagagttaggttctccagaagatttgcagcaaatccaacatgctagacaaagattctctgaccacagattcgaaaagaagcattccgccgatttgttaatgagaatgcaatttgctaaggaaaactcttcattcgtcaacttgccacagattaaagttaaggacaaagaagatgttatagaggaagctgttacccgtactttgagaagagcaattaatttttactccaccatccaagctgatgacggtaactgggcctctgatttgggtggtccaatgttcttattgccaggtttggtcattgctttatatgttactggtgtcttgaactctgttttgtccactgaacaccaacgtgaaatatgtagatacttatataatcatcagaacagagacggaggttggggtttgcacatcgagggtccttctaccatgttcggttcagtcttgaattacgttactttgagattattaggtgaagaagctgaagatggtcaaggtggtgttgacaaggccagaaagtggattttggatcacggtggtgctacagctattacctcctggggtaaaatgtggttatctgtcttgggtatctacgaatgggccggtaataacccattaccacctgaattgtggttgttgccatatttgttgccatgtcatcctggtagaatgtggtgtcactgtcgtatggtttacttaccaatgtgctacttgtatggtaaaagatttgtcggtccaattaccccaatcataagatcattaagaaaggagttgtacttggtcccatatcacgaagttgactggaacgaagccagaaatcaatgtgctaaggaagacttgtactacccacatccattagttcaagatgtcttatgggcttccttgcaccatgtttatgagccattgttcatgagatggcctgctaagagattgagagaaaaggctttgagatccgttatgcagcatatccactacgaagatgaaaactctcgttatatttgtttgggtccagtcaataaggtcttaaacatgttgtgttgctgggccgaagatcctcactctgaagcattcaagttgcatatcccaagaatctacgactacttgtggattgcagaagacggtatgcgtatgcaaggttataatggttcacaattgtgggacactgcattctctgttcaagctataatttctaccaagttggctgaagagtacggtactaccttaagaaaagctcacaaatatatcaaggattctcaagttttggaagattgtcctggtgacccaaacgtttggtttagacacattcataagggtgcttggccattttccacacgtgatcacggttggttgatctctgattgtactgccgaaggtttgaaggcctcattaatgttatctaagttgccatccaaaattgtcggtgaaccattagagaaggaaagaatatacgatgctgttaacgtcttgttatccttgcagaacgaaaacggtggtttcgcttcctacgaattaactagatcatatccatggttggaattaattaatccagccgaaacttttggtgacattgttattgactacccatatgtcgaatgtacctccgctgctatccaagccttggctgccttcaagaaattgtacccaggacacagatctaatgagataggtaactgtatcgctaaggccgcagatttcatcgaatctatccaagctactgatggttcttggtacggttcttggggtgtttgtttcacatacgctggttggtttggtattaagggtttggttgctgccggtagaacctataataactgttcatctttaagaaaagcatgcgacttcttattatcaaaggaattggccgctggtggttggggtgaatcctacttgtcttgccaagacaaagtctacactaatatcaaggatgaccgtcctcacattgttaacaccggttgggctactttgtccttgattgacgctggtcaagctgaaagagatccaacccctttgcaccgtgccgctagagttttaattaactctcaaatggacgatggtgactttccacaagaagagattatgggtgtcttcaacaagaattgcatgatcacttatgccgcttatagaaacatatttccaatatgggctttgggtgagtacagatgtcgtgttttacaagcaccataa

SEQ ID NO: 209 - DNA, 2277 bp, Artificial Sequence
  Synthetic
atgtggcgcttaaagattgcagagggtggaaacccgtggctgagaactaccaatgatcatgtcgggcgtcaagtttgggaatttgaccctgaattgggttcaccagaagaattgtctgctatagaattggctcggagagatttcacgaaaaacagattcgaacacaagcacagcgccgacctattaatgaggatccagttttccaaggagaatccattggaaagagtgcttccccaagtaaaattgaaggaaaaagaagatgttacaaaggaagctgttaagagtaccctagaaagagcgctttctttctactccgctgtccaaacttcggacggcaactgggcctctgacttaggtggtccaatgttcctcttgccaggtttggtcattgcactatctgttactggtgctatgaacgctgttctttccgaacaacataagtccgagatgagaagatatttatacaatcaccaaaacgaggatggtgggtggggcttgcatatcgaaggtcctagtacaatgtttggttcagtattgtcttatgtcaccctgagattgttgggtgaaggtgctaatgatggtgaaggtgccatggaaaaaggtagagattggattgtcaatcacggtggagccaccgctatcacttcttggggtaagatgtggttaagcgttttgggtgtctttgaatggagtgggaacaacccattgccaccagagatttggttgctgccttacatgttaccaatccatccgggtcgtatgtggtgccactgtagaatggtttacttgcctatgtcttatctatacggcaaaagattcgtcggtccaataactccaactgttttgtctttacgaaaggaattgttctccacgccctatcacgaaattgactggaatagagcgagaaacgaatgtgcaaaggaggacttatactacccacatccattgattcaagacttgctttggggttctctacacaactttgtggaacctatcctcatggcttggcctggaaagaagctaagagaaaaagcattgcgcaccaccctggaacacatccactatgaagatgaaaatactcgttacatttgtttgggtccagtgaacaaggttttgaacttgttgtgctgttgggtagaagacccatacagcgatgctttcaaattgcatttacaaagagtccacgattatttgtgggttgctgaggatggcatgaagatgcagggttacaacggttcgcaattgtgggacactgccttctccatccaagctatcctgtctacaaacttaattgaagaatacgcttcgacccttaaaaaggctcatgcctttgttaaagactcacagatacaagaagattgtccaggtgatccaaacgtttggttcagacatattcacaagggtgcttggccattctccaccagagaccacggttggcttatctctgattgtactgccgagggtcttaaggcttcgttgatgttatctaagctgccctcaacgatggtgggcgaaccactagaagctaataggttgtgtgacgccgtcaatgttcttctgtcattacaaaatgacaacggtggttttgcttcctacgaattgactcgttcctacccatggctcgaacttataaatcctgctgaaacattcggtgacattgttattgattacccatatgttgaatgcacatccgctaccatggaagcactgactctcttcaagaagttacaccccggtcatagaactaaagagattgacacctgtatcaagaaagccgtcgcgtttttggaaaaaatgcaaagagcggatggttcatggtatggttgttggggtgtttgttttacttacgctggttggtttggaatcaaggggttggttgctgctgggcggacctacaactcttgtttggccataagaaaggcttgcgagttcctcttgtcaaaggaattaccaggtggtggttggggtgaatcttatttgtcttgtcaaaataaagtctacactaacttggaaggtaacaagccacatttggtaaacaccgcctgggtcttgatggctttgattgaagccggacaagccgaaagagatccagctccactgcacagagctgctaggtttttaattaactctcaaatggaaaatggtgacttccctcagcaagagatcatgggggtgtttaacaggaattgcatgatcacgtattcggcttatagagatatcttccctatttgggccttgggtgaataccgcacgaaggttttgcatgccagcagctaa

SEQ ID NO: 210 - DNA, 2280 bp, Artificial Sequence
  Synthetic
atgtggcgtttaaaaatctcggagggaggcaatccttggttgaggacgacaaacaaccacgtcggtagacaggtgtgggaatttgacccagaactaggtagtccagaagaactctctgccattgaattggcacgaagagatttcaccaagaatagattcgaacaaaagcattcagcggaccttctgatgagaatacaattttctaaggagaaccccttggaaagagttttgccacaagtaaaattgagagaaaaggaagatgttactaaggaagctgtcaaaagcaccttagagagagctttgtccttctactctgctgttcaaacttccgatggtaattgggctagcgacttaggtggtccaatgtttctactgccaggtctagttatcgccttgtctgtcaccggtgctatgaacgctgttttatcagaacaacacaagtctgaaatgtgccgctatctttacaaccatcaaaacgaagatgggggttggggcttgcacattgaaggtccttccactatgttcggttcggttttgtcttatgtcactcttagattgttgggtgaaggaccgaacgacggtgaaggtgctatggggaagggacgggattggattttaaatcatggtggggctacagcaatcacctcctggggtaaattgtggttgagcgtcttgggtgtgttcgagtggtctggaaataacccactcccacccgaaatctggttattaccttacatgctaccaattcacccaggtaggatgtggtgtcactgtagaatggtttacctgccaatgtcctatttgtacggtaagagatttgttggtccgataactccaacagttttgtctttgagaaaggaattgttctccactccatatcacgagatcgattggaatagagcgcgtaacgaatgtgccaaggaagacttatactacccacatcctttaattcaggacttattgtggggttcattgcacaacttcgtagagccaattttgatggcatggccgggtaaaaaattgagagaaaaggctctgcggaccaccctagaacatattcattacgaagacgaaaacacaagatatatatgcctgggtccagtcaataaggtcttgaaccttttgtgttgttgggttgaagatccttacagtgacgcctttaagttacacttacaacgtgtacacgattacttgtgggtcgctgaagacggtatgaagatgcaaggctacaatggttctcaactctgggatactgctttctccatccaagctattttgtcaactaacctcgtagaagaatacgcctccacattgaaaaaggctcacacctatgttaaagacagccaaatccaggaagattgtccaggcgatcctaatgtttggtttagacatatacataagggtgcctggccattctctactagagaccatggttggttgatttcagattgtacagcagaaggcttaaaggcttcactaatgctttctaagttgccatctactatggtcggggaaccattggaagctaaccggctctgcgacgctgttaatgtcttgctatcgttacaaaacgacaacggtggtttcgctagctatgagttgaccagatcttacccatggttggaactgatcaatcctgcggagacatttggcgatatagttattgactacccgtatgtcgaatgtaccagtgccactatggaagctcttactttatttaaaaagttgcaccctggtcaccgtacgaaggaaatcgatacctgcattaaaaaagctgtcgccttccttgaaaagatgcaaagagctgatggttcttggtatggttgttggggtgtttgtttcacttacgcaggatggttcggtatcaagggtttagtcgcggctggtagaacgtataattcctgtttggctatcaggaaggcgtgcgaatttttgctaagtaaagaattgcccggtgggggctggggtgaatcttaccttagttgtcaaaacaaggtatacaccaacctagaaggtaacaagccacatcttgttaacactgcttgggtgttaatggctttgattgaggctgggcaagccgagagagatccggccccattgcacagagcagctagattcttgattaactcccagatggaaaacggtgattttccacaacaagacatcatgggtgtttttaatcgcaactgtatgataacctatgctgcttacagggacattttcccaatttgggctttgggtgaataccgtactaaggttttgcacgcaagcccttcctaa

SEQ ID NO: 211 - DNA, 2289 bp, Artificial Sequence
  Synthetic
atgtggagattaaaagttggtgcagagtccgtcggggaaaacgacgaaaagtgggttaagtctatatcaaatcatttgggtcgtcaggtctgggaattttgcccagatgctggtacccctcaacaattgttgcaaattgaaaaggccagaaaagctttccaagacaacagattccacagaaagcaaacttctgatttattggtttctatccagtgtgaaaaaggtactacaaacggtgctagagtcccaggtaccaagttgaaggagggtgaagaagttcgtaaggaagccgttaagtccactttggaaagagctttatccttttattcttcaatccaaacatctgacggtaattgggcttctgatttgggtggtccaatgttcttattgccaggtttggttattgccttatgtgtcaccggtgctttgaactccgtcttgtccaaacaccatagacaagagatgtgtagatacttgtacaatcaccaaaacgaagacggtggttggggtttacatattgaatccccatctactatgtttggttccgcattgaactacgttgctttgagattattgggtgaagatgccgatggtggtgaaggtcgtgctatgaccaaagctagagcctggatcttggggcacggtggtgctaccgccatcacttcttggggtaagttatggttatcagtcttgggtgtctatgaatggtctggtaataatcctttaccacctgaattttggttgttgccatacttcttgccattccaccctggtagaatgtggtgtcattgcagaatggtttatttaccaatgtcctacttgtacggtaagcgtttcgttggtccaataactccagtcgttttgtctttgagaaaggaattgtatactgttccttaccacgagattgactggaacaagtcaagaaacacctgtgctaaagaagatttatattacccacattctaagatgcaagatattttgtggggttctattcaccatatgtacgagccattgtttacccactggcctgctaaaagattgagagaaaaggctttgaagacagcaatgcagcacatccattacgaagacgaaaatactagatatatctgtttgggtccagttaacaaggtcttaaatatgttgtgttgctgggttgaagacccatattctgaagccttcaagttgcacttacaaagagtccacgattacttgtgggttgctgaagacggtatgaaaatgcaaggttacaacggttcacaattgtgggacaccgcattctccgttcaagctattatctctactaagttagtcgataactacggtccaactttgcgtaaggctcatgactatgtcaaaaactctcaaatccaacaagattgtccaggtgaaccaaacgtctggttcagacacattcacaagggtgcttggccattctccaccagagatcacggttggttgatttctgattgcacagctgaaggtttaaaagcatctttgatgttatccaagttgccttccgagacagttggggaacctttagaaagaaatcgtttatgtgatgccgttaatgttttgttgtccttgcagaacgacaatggtggttttgcatcatatgaattgactagatcttacccttggttggagttgattaacccagctgagacttttggtgacatcgttattgattacccatatgttgaatgtacttctgccaccatggaagctttagctttgttcaagaaattgcatccaggtcaccgtaccaaagaaatcgacacagcaatcgctcgtgctgctgattttttggagaacatgcaaagaactgacgggtcttggtacggttgttggggtgtctgtttcacttacgctggttggttcggtattaagggtttggtcgctgccggtagagcatattccaactgtttggctattagaaaagcctgtgatttcttattgtcaaaggaattgccaggtggtggttggggtgaatcttacttgtcctgtcagaacaaggtttatactaacttagaaggtaatagaccacacttggttaataccgcctgggttttaatggctttgatagaggctggtcaaggtgaaagagatcctgccccattgcacagagcagctcgtttattgatcaactctcaattggaaaacggtgattttccacaagaagaaatcatgggtgtctttaataagaactgcatgattacctacgctgcatatagaaacatattcccaatctgggctttgggtgagtactgtcatagagttttaactgaataa

SEQ ID NO: 212 - DNA, 2112 bp, Artificial Sequence
  Synthetic
atgggttctaataacttcgtcggccgtaagatgtggagattaaaattgggtgaaggtgcaaacaatccttatttgtggtcatccaacaactttgttggtagacagacttgggacttcgaggccgatgaaggtacaccagaagaaagagctcaaatagaagctgctagaaagacctactttcaaaacagattcaaagttcaatgttctaatgatttattctggaagtttcaagttttcgccttctacattactggtcatttgggtaccatctttccagaggaacaccaaaaggaattgttacgttatgcttactgccaccagaacgaagacggtggttggggtttgtacattatgggtgagtcctgtatgttatgtactgtcttgaattatatccaattgagattgttgggtgaagaaccagataccgacgcttgtaacagagcccgtaagtggattttggatcatggtggtgctttatacattccttcttggggtaagatctggttgtccatattgggtgtttacgaatgggacggtgctaacccaatgccaccagaattttggttattcggtaatgctttaccattgaaaccaggtcacttgttgggttactctcgtttgactttattgccaatgtcctatttatatggcaagagatttgtcggtacattaactcctttgattttgcaattgagacaagagatctacacccaaccatactctaatatcaaatggtcacctgccagacactactgtgctaaggaagataagtgcttcgaaagatcatggattcaaaagttggcatgggacgctgttcattacttaggtgaaccattgttgggctcttgggcattcaaatctgttagaaacagagctttgcaaattgccagatttcatatcgattatgaagaccaaaattcccactacatcacaatcggttgtgtcgaaaagccattgtgtactttggctacctgggtcgacgatccaaacggtcaggcctacaagaagcacttagctcgtgttaaggattacttgtggattggtgaagacggtatgaaaatccaatcattcggttctcaatcttgggatgttgctttcgctattcaagccattttggctaccaactttcatagagaattttctgatactttaaaaaagggtcatgatttcataaagaagtcccaaattagagagaatccttctggtgatttccaatccatgtatagacacatctcaaaaggttcctggtctttctctgaccaagatcacggttggcagttgtccgactgcactgctgaaaacttaacttgttgcttaatcttatctacaatgccaccagatatggtcggtgaccctatgaagccacaatgttttttcgatgcagttaatattatcttgtccttacaggccaagaacggtggtgtctccgcttgggaacctaccggtatcgtttcatcttggtttgaaagattgaatccagttgaatttttagaatattctattttggaattggaatacgtcgaatgtacttcttcctctttgcaagccttggttttgttcaaaaagttattcccaaaccacagaaaaaaagaaatcgagactttcataaccaagggtgtcaactatattaaggaaatgcaaaaagacgatggttcttggtacggtaactggggtatttgtcatttgtacgctacctacttcgcaattaaaggtttagttgctgttggttactcttacgactcctgttccacaataagaagaggtgtcgactttttgttaaagatccaatgtccagatggtggttggggtgaatcacatgtctcagtcaccaagaaggtttatactcctttgcaacacaacgcttccaacttggttcaaacttcattcgctttgatggctttgatccacgctcaacaagccaatagagatccaacaccagttcacagagcagctaagttgttgataaactctcaattagaagacggtgactaccctcaacaagaaattactggtgcatttatgggtaattgtatgttgcattatccattgtataaaaacgtcttcccattgtgggctttggccgattattgcaacttggttcctttgccataa

SEQ ID NO: 213 - DNA, 2271 bp, Artificial Sequence
  Synthetic
atgtggaaactaaaggtggcagagggtggcaccccatggttacggacattgaacaatcacgttggacgtcaagtctgggaatttgaccctcattctgggtccccacaggatttggatgacattgaaactgccagaagaaacttccacgataaccgattcacgcataagcacagtgacgatctgcttatgagattgcaatttgctaaggaaaatcccatgaacgaagttttacctaaagtaaaggttaaggatgtcgaagacgttactgaagaggctgtcgctaccactttgagaaggggtctcaacttctattcgaccatacaatctcacgacggtcattggccaggtgatttgggtggtccaatgtttcttatgccaggtttggttatcactttgtcagtaaccggtgctttaaatgccgtcttaacagatgaacatagaaaagaaatgagaagatacttgtacaatcatcaaaacaaggacggtggctggggtttgcacatcgagggtccgagcacaatgttcggatctgttctgtgttatgtcactttgagattgcttggtgaaggtccaaacgatggtgaaggggacatggaacgtggtagagactggattttagaacacggtggtgcgacttacatcacgagttggggtaagatgtggctaagcgttttgggcgtctttgagtggtccggtaacaatccaatgccaccagaaatttggctacttccttacgctctaccagttcacccaggtagaatgtggtgccactgtagaatggtatatttgcccatgtcctacttatacggcaaacgcttcgttggtcccattacccctacggtgttgtctttgaggaaggaattgttcactgttccatatcatgacattgattggaaccaagctcgcaatctttgtgcaaaagaagatttgtactatccacatccattggtccaggatatcctgtgggccaccttacataagtttgttgaaccagtcttcatgaactggccgggtaagaaattaagagagaaggctataaaaactgccattgaacacatccactacgaagacgaaaatacacgttatatatgtatcggacctgtcaacaaggttctcaacatgttgtgttgctgggttgaggatccaaattctgaagctttcaagttgcacttaccaagaatttacgactacttgtgggtggctgaagatggtatgaagatgcaaggttataacggttctcaattatgggacaccgcgtttgctgcccaagctataatcagtactaatttaattgatgaatttggaccgactcttaagaaggctcacgcattcattaagaactcacaagtgtccgaagattgtccaggtgacttgtctaagtggtacagacatatctcaaagggggcctggcccttttccaccgctgaccacggttggccgatctctgattgtaccgctgaaggtttgaaggctgttttgctactatccaagattgcgccggaaattgtcggtgaaccactggactctaaacgtttgtacgacgccgtgaatgttatcttgtccttacaaaacgaaaacggtggcctcgctacttatgagctaacgagatcctacacttggttggaaattattaatccagctgaaacattcggtgacattgttatagactgcccatatgtagagtgtacctctgctgctatccaggcactagccaccttcggcaaactatacccaggtcatcgaagagaagaaatacaatgttgcatcgaaaaagctgtcgcgttcattgaaaaaattcaagcttcagatggttcatggtacggttcttggggagtctgtttcacttacgcaacttggtttggtatcaaaggtttgatcgctgccggtaagaacttctcgaactgtttgtctataagaaaggcttgcgaatttttgttgtccaagcaattgcctagcggtggctgggccgaaagttatctttcctgtcaaaataaggtttattctaatttagaaggtaacagatcgcacgttgtgaacacaggttgggctatgttggcattgattgaagccgagcaagctaagagagatccaacgcctttgcaccgtgcggctgtttgtttaattaactctcaactcgagaacggcgatttccctcaggaagaaatcatgggtgtctttaacaaaaattgtatgattacttacgccgcttaccgttgtatttttccaatctgggctcttggtgaatacagaagagttctgcaagcctgctaa

SEQ ID NO: 214 - DNA, 2295 bp, Artificial Sequence
  Synthetic
atgtggcgtttgaaagtcggagccgagagtgttggcgaagaagatgaaaagtgggtgaagtccgtttctaaccacttaggtaggcaggtatgggaattttgtgctgacgcggcagccgacaccccacatcaactgttgcaaatccaaaatgctagaaaccacttccatcacaatagattccatagaaagcaatcgtctgatctttttttggctatacaatatgaaaaagaaattgctaagggtgctaagggtggtgccgttaaagtcaaggaaggtgaggaagtcgggaaagaagctgttaagagcacactagaaagagctttgggtttctactccgctgtacaaactagagatggtaactgggcatccgacctaggtggtcccttatttttgttacctgggttggttattgcgctccacgtcactggtgttttgaatagtgtcttgtctaagcatcaccgtgttgaaatgtgcagatacctatacaaccatcagaacgaggatggtggttggggtttgcacatcgaaggcacctctaccatgttcggttcagcccttaactatgtcgctttaagactgctcggagaagacgctgacggtggggatggtggtgccatgacgaaggctcgagcttggattttggaacgcggtggtgccactgctatcacatcttggggcaaattgtggttgtcagttttaggtgtttacgaatggagcggtaataatccattaccaccagaattttggttgctaccgtactcattgccattccaccctggtagaatgtggtgtcattgtagaatggtctatttgccaatgtcctacttgtacggaaagagattcgttggtccaataactcctaaagttctttctcttagacaagaattgtatacaattccataccacgaaattgactggaacaagtctcgcaatacctgcgccaaagaggatctgtattacccacatcctaagatgcaagacatcttgtggggttctatttaccatgtgtacgaaccattatttactcggtggccgggcaagaggttaagagagaaagcccttcaagctgcaatgaagcacatccactatgaagatgaaaactcgcgttacatatgtttgggtccagtcaacaaggtcttgaacatgctttgttgttgggttgaagatccatattccgacgcattcaaattgcatttgcagagagtgcacgactacttatgggttgctgaagatggcatgagaatgcaaggatacaatggttcgcaattgtgggacactgctttcagtatccaagctattgttgctaccaagttagtcgattcctacgctcctaccttaagaaaggcccacgatttcgttaaggattcccaaattcaggaagattgtcccggtgatccaaacgtgtggtttcgacacatccataaaggtgcatggccattgtctactagagaccatggttggttaatctctgactgtacggctgaaggtctcaaggcctccttgatgttgtctaaattaccttcgactatggtaggtgaaccactggaaaagaacaggttgtgcgacgctgttaacgttctattatcactccaaaatgacaacggcggtttcgcctcttatgagttgactagatcatacccatggttggaattgattaatccagctgagaccttcggtgacatcgttatcgactatccatacgtcgaatgcactgccgctacaatggaggctttgactttattcaagaaactgcaccctggtcatagaacgaaggaaattgatactgccattggtaaggctgctaattttctggaaaaaatgcaacgtgcagatggtagttggtatggctgttggggtgtctgtttcacctatgctggttggtttggtataaagggattagttgctgcgggtagaacctataattcttgtcttgcgatcagaaaagcttgtgagttcttgctatctaaggaattgcccggaggtggctggggtgaaagctacttgtcctgtcaaaacaaggtctacaccaacttggaaggtaacaagcctcacttggttaacactgcttgggtattaatggccttgattgaagctggacaaggggaaagggatccggcgccattacatagagctgcaagattgctaatgaacagccaattggaaaatggtgatttcgtacaacaggaaattatgggtgtattcaataagaattgcatgattacgtacgccgcctatcgtaacatctttccaatctgggcgctaggtgagtactgtcatcgagtgctaacggaataa

SEQ ID NO: 215 - DNA, 2295 bp, Artificial Sequence
  Synthetic
atgtggcgtttgaaggttggtgctgagtctgtcggagaaaaagacgaaaagtgggtcaaatccgtttcaaatcacttaggtagacaagtttgggaattttgcgccgatgctgatgcagttacccctcatcagtctttgcaaattcacaacgctagaaaccatttccaccaaaatagattcagaagaaagcaatcttccgacttgtttttagctatacaatatgaaaaggagatcgccaagggtgttaaggtcggtgctgttaaagtcaaagaaggtgaagaagttggtaaggaagcagtcaagtctacattggagcgtgctttgtcattctactccgctgtccagacttctgatggtaactgggcctctgacttaggtggtccaatgttcttgttgccaggtttagttattgccttgtacgttactggtgttttaaattccgtcttgtccaagcaccatagattggaaatgtgtagatatttatacaaccatcaaaacgaagatggtggttggggtttgcacatcgaaggttcttccaccatgtttggttcagctttgaactacgtcgctttaagattgttgggtgaagacgttgatggtggtgatggtggagctatgactaagggtagagcatggattttggaccgtggttctgccactgccatcacctcttggggtaaattatggttgtccgttttgggtgtctacgagtggtccggtaacaacccattacctccagaattttggttgttgccatattctttaccattccacccaggtagaatgtggtgtcactgtagaatggtttacttgccaatgtcatatttgtacggtaagagattcgttggtcctataacaccaattgtcttatctttgagaaaggaattgtacaccgttccttaccatgaaatcgactggaataagtccagaaatacttgtgctaaagaagacttgtattacccacacccaaaggtccaagatattttgtggggtactatccaccatgtttacgaaccattgttctctggttggccatgcaaacgtttgagagaaaaggctttgcaaactgccatgaaacacattcactacgaagatgagaactctaactatatctgtttaggtcctgttaacaaggttttgaatatgttatgttgctgggttgaagacccatattcagacgcttttaagttgcatttgcaaagaatccatgatttcttatgggtctctgaggatggtatgaagatgcaaggttacaacggttcacagttgtgggataccgctttttccattcaagccattgcttctacaaagttggttgacacatacggtcactcattaagaaaagcacacaatttcgtcaagaactctcaaatacaacaggattgtccaggtgattccaatgtctggtttagacacatacataaaggtgcttggccattctctacccgtgatcacggttggttaatctccgactgtactgctgaaggtttaaaagcttcattgaccttatctaagttgccatcccaattggttggtgaacctttggaaaagaacagattgtatgacgcagttaatgtcttgttgtcattacaaaacgaaaacggtggtttcgcttcctacgaattaactagatcttatccttggttggagttgattaacccagcagaaacttttggagatattgttatcgattattcttacgttgaatgcactgctgccaccatggaggctttggcattattcaagaagttacacccaggtcatcgtaccaaggaaatcgatacctgtattgctaaggccgccaacttcttggaaacaatgcaaagaactgacggttcttggtatggttgttggggtgtttgtttcacctacgctggttggtttggtatcaaaggtttgatcgctgctggtagaacatacaagacctgtattgctataagaaaggcctgcgattttttattgtctaaagaattgcctggtggtggttggggtgaatcttacttgtcatgtcaaaacaaggtctacactaatttggagggtaatcgtccacacttggtcaatactgcttgggtcttgatggccttgattgaagctggtcaagctaaaagagaccaggccccattgcatagagccgctcgtttattaattaattcacaattggaaaatggtgacttccctcaacaagaaataatgggtgtttttaacaagaattgtatgatcacttatgctgcttacagaaacatctttccaatttgggccttgggagagtattaccatagagttttgactaaataa

SEQ ID NO: 216 - DNA, 2280 bp, Artificial Sequence
  Synthetic
atgtggagattgaaagtaggtgctgaatccgtaggtgaaaacgacgaaaagtggttgaaaagtataagtaatcatttgggtagacaagtctgggaattttgtccagatgcaggtacacaacaacaattgttgcaagtacataaggctagaaaggcatttcatgatgacagattccacagaaagcaatcttcagatttgttcatcaccatccaatacggcaaggaagtagaaaacggtggcaagactgctggtgttaaattgaaggaaggtgaagaagttagaaaagaagcagttgaatccagtttggaaagagccttgtctttctactcttcaatccaaacctctgatggtaattgggcatcagacttgggtggtccaatgttcttgttacctggtttggtcattgccttgtacgtaactggtgttttgaactctgtattgtcaaagcatcacagacaagaaatgtgtagatacgtttacaaccatcaaaacgaagatggtggttggggtttgcacattgaaggtccatccactatgtttggtagtgcattgaattatgtcgccttaagattgttaggtgaagatgcaaacgccggtgctatgcctaaggcaagagcctggatattagaccatggtggtgctactggtatcacatcctggggtaaattgtggttaagtgtcttaggtgtatatgaatggtctggtaataacccattgccacctgaattttggttgttcccttactttttaccattccatcctggtagaatgtggtgtcactgcagaatggtttacttgccaatgtcttacttgtacggcaagagattcgttggtccaataacacctatcgtcttgtcattgagaaaggaattgtacgcagttccttaccatgaaatcgattggaacaagtccagaaacacctgtgctaaggaagatttgtattacccacaccctaaaatgcaagacattttgtggggtagtttacatcacgtttacgaaccattatttactagatggcctgctaaaagattgagagaaaaggcattacaaacagccatgcaacatatccactacgaagatgaaaacaccagatacatctgcttgggtccagttaacaaggtcttgaacttgttgtgttgctgggttgaagatccttattctgacgctttcaagttgcatttgcaaagagtacacgattacttgtgggttgcagaagacggtatgaaaatgcaaggttacaatggttcacaattgtgggatacagctttttccattcaagcaatagtcagtactaagttggtagataactacggtccaacattaagaaaagctcatgacttcgtaaagtccagtcaaatacaacaagattgtccaggtgaccctaatgtttggtatagacatatccacaaaggtgcatggccattttctaccagagatcatggttggttgatttcagactgtactgctgaaggtttgaaggctgcattgatgttgtctaagttgccatcagaaactgttggtgaatccttggaaagaaatagattatgcgatgccgttaacgtcttgttgagtttgcaaaacgacaacggtggtttcgcttcttacgaattgactagatcatacccatggttggaattaattaatcctgctgaaacattcggtgatatcgtcattgactatccatacgtagaatgtacctccgctactatggaagcattgaccttgttcaagaagttgcatcctggtcacagaacaaaggaaatcgataccgcaattgttagagccgctaatttcttggaaaacatgcaaagaacagacggttcttggtatggttgttggggtgtttgctttacctacgctggttggttcggtattaaaggtttagtcgcagccggtagaacatacaataactgtttggccataagaaaagcttgcgatttcttgttatctaaggaattaccaggtggtggttggggtgaatcctacttgagttgtcaaaacaaggtttacactaatttggaaggcaacagacctcatttagttaacacagcctgggtcttgatggctttaatcgaagccggtcaagctgaaagagatccaactcctttgcatagagctgcaagattgttgatcaactcacaattggaaaacggtgattttccacaacaagaaatcatgggtgttttcaacaagaactgcatgataacatatgccgcttacagaaacatttttcctatatgggctttgggtgaatactgccacagagtcttgaccgaataa

SEQ ID NO: 217 - DNA, 2280 bp, Artificial Sequence
  Synthetic
atgtggaggcttaaagtaggcgcggaatcagtcggggagaatgacgaaaagtggctgaaaagcattagtaaccacttgggtcgccaggtgtgggaattttgcccagatgcaggtacgcaacaacaactattacaggttcataaggctagaaaagccttccatgatgaccgttttcacagaaagcaatcgtccgatttattcatcaccatacaatatggaaaagaggttgaaaatggaggtaagacagctggcgtaaaactcaaggagggtgaagaagttagaaaggaggcagtcgaatcttctttggaacgggctttatcgttttactcttcaattcaaacttccgatggtaactgggccagtgacctgggtggtccgatgtttttactacccggcttggttatcgccctttatgtaaccggcgtcctgaatagcgtgctatccaaacatcataggcaggaaatgtgtcgatacgtttataaccaccaaaatgaggatgggggttggggattacatattgaaggaccttcaacaatgttcgggtctgcacttaattatgtcgctttgagactcttaggcgaagacgcaaacgctggtgccatgccaaaagcaagagcgtggatattggatcacggaggtgcgactggtatcacgtcatggggcaaactttggctctcggttttaggagtgtacgagtggagtggcaataatcctctaccacctgaattttggctgtttccttatttcttgccgttccatcccgggcgaatgtggtgtcattgcagaatggtatatttaccaatgagttacctctatggtaagcgttttgtaggtccaattactcctatagttttgtctttacgcaaagaactatacgctgtcccataccatgagatcgattggaacaagtcgcgtaatacatgtgctaaagaagatctttattacccccacccgaaaatgcaggacattctgtgggggtcattgcatcacgtttatgagcccttatttaccagatggccggcgaaaagactaagggaaaaggctttgcaaactgccatgcaacatatacactacgaagatgaaaacacaagatacatttgtttagggcctgtaaataaagtgttgaatttactttgctgttgggtagaagacccatatagcgatgcatttaagctccatttgcagagggttcacgactatttatgggtcgctgaagatggaatgaaaatgcaaggttataatggatctcaattgtgggacacagcatttagcattcaggccattgtctctactaaactcgttgataactacggcccaacgctacggaaggcccatgatttcgtgaaaagcagtcagatacaacaagattgccctggcgatccaaacgtgtggtataggcatatacacaagggtgcttggccattctcaacaagagatcatggttggctgatctccgattgtacagctgagggattaaaggcggcattaatgttgtctaaattaccgagtgaaaccgttggtgagagcttggaaagaaatagactgtgtgatgccgtgaatgtgttgctttccctgcaaaatgacaatggaggtttcgcgtcgtatgaactaactcgatcttatccttggttagaacttatcaaccccgcagaaacctttggggatattgttatcgattatccatacgtggagtgtacttcagcaaccatggaggctttgacactgtttaaaaaacttcatcctggacatcgtactaaggaaattgatacggccatagtacgcgcagctaactttctagaaaatatgcaaagaactgatggtagttggtacggttgctggggcgtttgtttcacttacgctggctggtttggaattaaaggtctagtagctgccggacgtacatataacaattgcttggccattagaaaggcttgtgactttctcttatcaaaagaactacctggtggtgggtggggagagtcttatcttagctgccagaacaaagtatatactaatttggaaggcaacaggccacaccttgttaacacagcatgggtattgatggctctgattgaagctggtcaagctgaacgagacccaacgcccttacacagagcagcaagactgctgatcaattcacagttagaaaatggtgatttccctcagcaagagatcatgggcgtttttaacaagaattgtatgattacttacgccgcatatcgtaacatatttccgatttgggcattaggggaatactgccatagggtgcttactgaataa

SEQ ID NO: 218 - DNA, 2292 bp, Artificial Sequence
  Synthetic
atgtggcgtttgaaagttggtggtgagtctgtcggagaaaaggaagaaaagtgggttaaatcaatatccaatcatttaggtagacaagtctgggaattttgccctcacgatggtacaccagaacagagattgcaagttcaaaaggcaagagacgctttcttcagaattaacagatttcgtagaaagcaatcttccgatttattcttggctatccaatatgaaaaggagatcgccaacggtgctaccgtcggtggtattaaattgaaggagggtgacgaagttagaaaggaagccgttaagtctactttagaacgtgctttgaatttttactctgctgttcagactaccgacggtaactgggcttccgatttgggtggtccaatgttcttattgccaggtttggtcatcgcattatacgttactggtgtcttgaactctgtcttgtcaaaaaatcacagacaagaaatgtgtagatatttgtacaaccatcaaaacgaagatggtggttggggtttgcacattgaaggtccttccaccatgttcggttctgctttaaactacgttgccttgagattgttgggtgaagatgccgacggtggtgacggtggtgctatgactaaggctagagcttggatcttggacagaggaggtgccaccgccattacatcttggggtaaattgtggttatcagttttaggtgtttatgagtggtctggtaataatccattaccaccagaattttggttgttgccatatttcttaccattccatccaggtcgtatgtggtgtcactgtagaatggtctacttacctatgtcctacttgtacggtaagagatttgttggtcctattactccaatcgtcttgtccttgagaaaggaattgtataccgtcccataccacgaagttgattggaacaagtccagaaatacttgtgctaaagaggatttgtactatccacatccaaagatgcaagacatcttgtggggttctatacaccatgtttacgaacctttgttttcaagatggccaggtaagagattaagagaaaaagctttacaatctgcaatgcagcacattcactatgaagatgaaaacactagatacatatgtttaggtccagttaacaaggtcttgaacatgttgtgctgttgggttgaagatccttactctgatgctttcaagttgcatttacaaagagtccatgactacttatgggtttctgaagatggtatgaaaatgcaaggttacaacggttcccaattgtgggacactgccttctcaattcaagctattgcttcaacaaagttagttgactcttatggtccaaccttgagaaaggcacacgacttcgtcaaaaactctcaaatccagcaagattgtccaggtgattccaatgtctggttccgtcatatccacaagggtgcctggcctttctctactagagaccacggatggttgatttctgattgcaccgctgaaggtttgaaggcttcattgatgttgtctaagttaccatccgaaatagtcggtccatctttggagaaaaacagattgtgtgatgcagttaatgttttgttgtctttgcaaaatgacaacggtggttttgcttcctacgaattaacccgttcttacccatggttagaattgatcaacccagcagaaacattcggtgacatcgtcattgattattcatacgttgaatgtacttccgctacaatggaagctttgaccttgtttaagaagttgcacccaggtcatagaactaaagaaattgacaccgccatcggaaaggctgccaacttcttggagaagatgcaacgtactgatggttcttggtacggttgctggggtgtttgtttcacttacgctggttggtttggtattaaaggtttggttgctgctggtagaacatacaattcctgtatagctattcgtaaggcatgtgatttcttgttgtccaaggaattaccaggtggtggttggggtgaatcttacttgtcttgtcaaaacaaagtttacactaatttggaaggtaacagacctcacttagttaacaccgcctgggtcttgatggccttgatcgaagctggtcaagctgagagagaccctgctcctttgcacagagctgccagattattgataaattcccaattagaaaacggtgatttcccacaagaagaaattatgggtgtttttaataagaactgtatgatcacctatgcagcttatagaaacatctttccaatttgggccttaggtgaatactgccatagagttttaactgagtaa

SEQ ID NO: 219 - DNA, 2328 bp, Artificial Sequence
  Synthetic
atgggtagacgtgagagatggggcggtagaagagaaataatgtggagattgaaagttggtggtgaatccgtcggtgaaaaggaagaaaagtgggttaaatctatttcaaaccacttaggtagacaagtttgggaattttgtccacatgacggtacacctgaacagcgtttgcaagtccaaaaggcaagagatgctttcagaatcaatcgtttcagaagaaagcaatcttctgacttgtttttggctatccaatacgagaaggaaattgccaacggtgctactgtcggtggtattaaattaaaggagggtgatgaagtcagaaaagaagccgttaagtccaccttggaaagagctttaaacttctattccgctgttcaaactaccgatggtaattgggcctctgacttgggtggtccaatgtttttattgcctggtttggttatcgctttatacgtcactggtgttttgaactctgttttgtcaaagaatcaccgtcaggaaatgtgcagatacttgtataaccatcaaaacgaagacggtggttggggtttgcacattgaaggtccatccaccatgttcggctctgcattaaattacgttgctttaagattgttgggtgaggatgctgatggtggtgacggtggtgctatgacaaaggcacgtgcctggatcttggacagaggtggtgctactgctataacttcatggggtaaattgtggttgtccgtcttgggtgtctatgaatggtccggtaacaatccattgccaccagaattttggttattaccatacttcttgcctttccacccaggtagaatgtggtgtcattgtagaatggtttatttgcctatgtcatacttgtacggtaagcgtttcgtcggtccaattaccccaattgttttgtctttaagaaaggaattgtacactgttccataccacgaggttgattggaataaatctcgtaacacttgtgccaaggaagacttgtactatccacacccaaaaatgcaagatatcttgtggggttctatccatcacgtctacgaaccattattttctcgttggcctggtaagagattgagagaaaaggctttacaatctgctatgcagcatattcattatgaggatgaaaacaccagatacatttgcttgggtcctgttaacaaagttttaaatatgttgtgttgttgggttgaagatccatattcagatgcatttaagttgcacttgcaaagagttcacgactacttatgggtctccgaagatggtatgaagatgcaaggttacaatggttcccaattgtgggacacagccttctctatacaagctatcgcttcaacaaagttagtcgattcttatggtccaaccttaagaaaggctcatgactttgtcaaaaactctcaaattcaacaagattgcccaggcgattccaacgtctggttcagacatatacacaagggtgcctggccattctcaactagagaccacggttggttgatttccgactgtactgccgaaggtttgaaggcttctttaatgttatctaagttgccatctgaaatcgttggtccttctttagagaaaaacagattgtgtgacgctgttaacgtcttattgtccttgcaaaacgataatggtggttttgcatcttacgaattaaccagatcctacccttggttggaattgattaatccagcagaaactttcggtgacatcgttattgactactcttatgttgaatgtacatccgctaccatggaagctttaactttgttcaagaagttgcacccaggtcatagaaccaaagaaatcgacaccgccataggtaaggctgctaacttcttggagaagatgcaacgtactgacggttcttggtacggttgctggggtgtctgtttcacttacgccggttggtttggtatcaagggtttagtcgctgctggtagaacttataactcctgtatcgctattagaaaggcatgtgattttttgttgtctaaggaattacctggtggtggttggggcgagtcttacttgtcctgtcaaaacaaagtctacactaacttagaaggtaatagaccacacttggttaatactgcatgggtcttaatggctttgattgaagccggtcaggctgaaagagacccagccccattgcatagagctgcccgtttattgattaattcacaattggagaacggtgatttcccacaagaagaaattatgggtgtcttcaacaaaaactgcatgataacctatgctgcatacagaaatatctttccaatctgggctttgggtgaatattgtcacagagttttgacagaataa

SEQ ID NO: 220 - DNA, 2274 bp, Artificial Sequence
  Synthetic
atgtggaaattgaaggtcgccgagggtggctctccatggttacgtacattgaatggtcacattggtagacaagtttgggaatttgaccctaacttgggttccccaaaggatttagaagaaatagaaaagttcagagcagaattttataaaaacagattcgaaactaagcattcatctgatttgttaatgagataccagttctcaaaggaaaacccagttggtaccatcttgccaagagtccaagttaaggacatcggtgatattaccgaggacaatgtcgctactaccttgcgtagagctatttccttttactctactttgcaagctcacgatggtcattgggccgctgactgtggtggtccaatgttcttgttacctggtttagttatcgctttgtctgttacaggtgccttgaacgctgtcttgtctgaagaacacaaaagagagatctgccgttacttatataatcatcaaaactgtgacggtggttggggtttgcacattgaatcccactcaactatgttcggttctgtcttatcttacgttactttgagattgttaggtgaaaaggcaaatggtggtgaaggtgctatggagaagggtagaaaatggatattggatcatggtaccgccactgctattacttcctggggtaagatgtggttgtccgttttgggtttgtttgattggtctggcaacaacccattgcctccagaaatgtggttattgccatacattttgccattccatccaggtagaatgtggtgtcactgccgtatggtttatttacctatgtcttacttatatggtaaaagatttgtcggtccaatcacccctacagttttgtctttaagaaaggaattgttcactgtcccataccacaagatcaattggaacaaggctagaaacgaatgtgctaaggaagatttgtattacccacaccctttgttgcaagacatattatggacttccttggataaattgatcgaaccattgttcatgcattggccaggtaaaaaattgagagaaaaggccttatccaccgttatggaccacattcactacgaagatgaaaatacccgttatatttgtttgggtccagtcaataaggttttaaacatgttatgttgctgggtcgaagattcatcttctgaagcttttaagttacatttgccaagattgtacgactatttatggattgcagaggacggtatgaaaatccaaggttataacggttcccaatcatgggatacctccttcgctatacaggccattatttctactaatttggtcgaggaatacggcccaacattaagaaaggcacacaagtttatgaaaaactcccaagttttggacgattgtcctggtaacttggacttctggtaccgtcacatctcaaagggtgcttggccattctccactgctgatcatggttggccaatttctgactgtacagctgagggtttgaaagcctgtttattgttgtcaaagttgcctgttgaaatcgttggtgaaccattgaaggctaacagattgtacgatgcagttaatgtcatgttatctttgcaaaatccagatggtggtataggtacctacgaattgtctcgttcatatccatggttggaaattatcaatccagctgaaacctttggtgacatcgttatcgattacccatatgttgaatgtacctctgccattatccaggctttagctgctttcaagaaattataccctggttatagaaaggaggatgtcgaaagatgtattgaaaaaggtgctgccttcatagagaagattcaagaagctgacggttcttggtacggttgctggggtgtttgttttacttacggtacttggtttggtgttaagggtttgttggatgcaggtagaaactttaacaactcctacaacattagaaaggcctgtgatttcttattatccaagcaagtcgtctccggtggttggggtgaatcttatttatcttgtcagaacaaggtttataccaacttgaagggtaacaagtctcattccgtttgtacagcttgggctatgttggctttgattgaagcaggtcaaggtgagagagaccctactccattacatagagctgccaaagtcttgattaattctcaattagaaaatggtgatttcccacaacaagaaatctctggtgtcttcaacaaaaactgcatgatctcctactctgcatacagaaatattttcccaatctgggctttgggtcaataccaatctcaattgttgaatccacaataa

SEQ ID NO: 221 - DNA, 2307 bp, Artificial Sequence
  Synthetic
atgtggaaattgaaggttgcagccgagggtgggggtggtcctttattgagatctactaatcgttttgtcggtagaacagtttgggaatttgaaccagatttaggtaccccagaacaaagagctgaagtcgagaaggctagaagagacttctcagatcatagattccagcgtagacactccgctgacgttttgatgcgtatgcaaatgcaacaatactctaaaggtactccattgaagttagatttgccagctgtcaagaagttgggtgaagacgaagatgttactgaagaagccgtttccacctctttgaagagagctatcaacagagtctctgctttacaagcccacgacggtcattggccaggtgattgttccggtcctttgttcttgttgccaggtttaattataaccttgtatgttacaggtgccttgaacgcagtcttatcatctgaacaccaaagagaaattagaagatacttatacaatcaccaaaacgaagatggtggttggggtttgcatatggaaggtcactccgctatgttgggtactaccttgaattatgttgcattaagattaatcggtgagggtccagactctggtggggacgatggtgctgctatggaaagaggtcgtaactggattttgcagagaggtggtgccacttacacaacttcatggggtaaattctggttgaccgttttgggtgtctacgactggtccggtaacaatccattgcctcctgaaatgtggttgttgccatatcatttaccatttcatccaggtagaatgtggtgccactgtcgtgctgtttatttgccaatgtcttacgtttacggtaagagattcgtcggtcgtatcactccattggttttagagttgagaaacgaattgtacggtgatccatattcattgatagattggaataaagctagaaaccaatgtgctaaggaagatttgtattacccacactcctttttacaagacgttttgtgggctaccttgcataaattcgtcgaacctgttatgatgcattggccaggtattaagttcagagaaatcgccttaagaaccgctatgagacacatccactacgaagacgaatctacacgttacattaacttgggtcctgtcaacaaggttttgaacatgttagcttgttggattgaggatccaaattctgaagcttttaagttgcacgtcccaagaatttatgattacttgtggttagctgaagacggtatgaagatgaaaggttacaacggttctcagttgtgggacgctggtttgactgttttggccatcgttaataccgacttaatcgaggaatttggtccaactttaaagttggcccatgcattcgtcaaaaactcacaaataattgacaattgtttggaagatttgaaccaatggtatagacacatgtctaaaggtggttggcctttttccaccgctgaccacggttggtgcgtttccgattgtactgcaactggtttagaagccaccttgttattgtctactatatccccacaaatcgtcggtgaggctatggaagttggtagagtttacgatggggttaactgtttgatttcattgatgaacaataatggtggtttcgcaaccttcgaattgactagatcctatgcttggttagaacatattaacccttcagaaactttcggtggtatcatgatcgattacccatacgtcgaatgcacatcttcttctatacaagccttagcattattcaagaagttgtacccaagacacagaactgaagagatcgactcttgtatttccaagggtgctaactttattgagtcaatgcaaagaaatgatggttcttggtatggttcttggggtgtctgttttacttacgctacatggttcgctgttttcggtttggcttgtgccggtagaacatttgaagattccccagctataaaaaaggcttgcgaatttttattatctaaggaattgccatccggtggttggggtgaatcttacttgtcctgtcaagataaggtctacaccaatttggaggggatgagacctcatgccgtcaacacatcttgggctatgttggctttgattcgtgttggtcaagctgaaagagacccagcaccattgcacagagctgcaagagttttgattaacttgcaatccgaagacggtgaatttccacaacaggagatcatcggtgttttcaatcagaactgtatgattggttactctcaatatagaaacatcttcccaatttgggctttaggtgaataccgtactaaagtccatgtcccacgtaaaaagtaa

SEQ ID NO: 222 - DNA, 2274 bp, Artificial Sequence
  Synthetic
atgtggcgtttgaagtttgctgagggtggatcaccatggttaagaacaactaataaccatgttggtagacaagtctgggaatttgaccctagattgggtaccccagaagaattggcagaaatagaggaagctagaaaatccttcgccgaaaacagattcgttcacaagcactcttctgatttattgatgcgtttacagttctccagagagaatccagtcagacaagttttgccacaagtcgaagttaaggatactgacgatatctctaaagaagctgtcaagtctaccttggaaagagccttgtcattctattcagctgttcaaacttctgacggtaactgggcatctgacttaggtggtcctatgtttttgttaccaggtttggtcattgctttgtccatcaccggtgctttgaatgccgttttatccgaacaacataagcaagaaatgtgccgttacttgtacaaccaccagaacgaagatggtggttggggtttacatattgaaggtccttctactatgttcggttctgttttgaactatgttacaatgagattgttgggtgaaggtccaaacgatggtgacggtgctatggaaaagggtagagactggattttgaatcacggtggtgctacctacatcacctcctggggtaaaatgtggttaactgtcttaggtgtttttgagtggtctggaaacaatccattgcctccagaaatttggttgttgccatacatattaccaatccacccaggtagaatgtggtgtcattgtagaatggtctatttgccaatgtcttacttgtatggtaaacgtttcgtcggtcctattaccccaactgttttatccttgagaaaggaattattcaccgttccataccatgaggtcgattggaacaaggcaagaaatttgtgtgctaaggaagatttatactacccacacccagttgttcaagacattttgtgggcctctttgcataaggttgttgaaccaatattgatgcgttggccagtcactaaattgagagaaaaagcattaagaactgctatcgaacacatccattatgaagacgagaatacaagatatatctgcttgggtcctgttaacaaggtcttaaatttgttgtgttgttgggtcgaagatccttactcagatgcttttaagttgcacttgcaacgtgtccacgattacttgtgggtcgctgaagacggtatgaaaatgcaaggttataacggttctcaattatgggataccgccttttccattcaagctattttcgctactaactttgttgaagagtacggtgacgtcttgaagaaggctaactcctacataaaagattcccaaattcaagaggactgtccaggtgacccaaacgtttggttcagacacatccacaagggtgcctggcctttctctaccagagatcatggttggttaatctcagattgtactgctgaaggtttgaaagcctcattgatgttgtccaagttgccatctaccatggttggtgaaccattggaagctaatagattgtgcgacgcagtcaacgttttgttatcattgcagaatgataacggtggtttcgcttcctacgaattgacaagatcttacccatggttagaattaattaacccagccgaaactttcggtgacatcgttattgactatccatatgtcgaatgtacttctgcaaccatggaggctttaaccttatttaagaagttgcacccaggacatagaacaaaggaaatagatcaatgtatcaagaaggctgctaagttcttggaaaaaatgcaaagagcagatggttcctggtacggttgttggggtgtctgtttcacttacgctggttggtttggtataaaaggtttagttgctgccggtagaacttacaactcttgtttggcaattagaaaggcttgtgaatttttgttatctaaggaattgccaggtggtggttggggtgagtcatatttatcctgccaaaataaggtttacactaacttggaaggtaataagcctcatttggtcaacactgcctgggtcttgatggccttgattgaagctggtcaacacgaacgtgacccaaagcctttgcatcgtgctgctagatatttgatcaattcccaattagaaaatggtgatttcccacagcaagaaattatgggtgttttcaacaaaaactgtatgatcacatacgccgcttacagaaacatttttcctatttgggctttaggtgaatacagatctcaagttttgcaagctgcataa

SEQ ID NO: 223 - DNA, 1992 bp, Artificial Sequence
  Synthetic
atggaccgtcagtcatttagagataatagattccatagaaagcaatcttccgatttgttcttagccatacaatttgcagaagagaaacaatctgtcactaacttgccacaaacaaagttagaagaatttgaagacgttaagaaagaggctgttaagtccaccttggaaagagctttgtctttctactccgctgtccaaacttctgacggtaactgggcctctgatttgggaggtcctatgttcttattgccaggtttggttattaccttatatgtcaccggtgctttgaatactgttttgtcaaaagaacaccagtacgaaatctgtcgttatttgtacaaccaccaaaacagagacggtggttggggtttacatatcgaaggtccatcaactatgtttggtacagttttgaattacgtttctttaagattgttaggtgaaggtgctgaaggtggtgagggtgctattgaaaaggctagacgtatgtggtgccactgtagaatggtctacttgccaatgtccttcttgtatggtaagaaattcgttggtccaattactcctaccatcttatccttgagaaaggaattatacaccgtcccataccatgaagttgattggaacaaggccagaaatgcatgtgccaaggaagatttgtattaccctcacccattggttcaagacattttgtgggcttctttgcactacttgtatgaaccaatgttgaagtactggccttgtaaatctttgagagagaaggccttacaaatcgttatgcaacatatccactatgaagacgaaaacactcgttatatttgcttaggtccagtcaataaagtcttaaacatgttgtgttgttgggtcgaggatccatactccgaatcttttaagttgcacttgccacgtatattggactacttgtggattgctgaagatggtatgaagatgcaaggttacaacggttctcaattatgggatacagctttcgctatacaagcaattatctccaccggtttagctgacgagtacggttccgttttgagaaaggctcatgacttcttaaaagattcacaaatccaagaagactgtccaggagatccaaacgtctggtttagacacattcataaaggtgcttggccattttctactagagatcatggttggttgatttccgattgcactgccgaaggtttaaaggcttctttgatgttgtctaagttgccatcaactatggtcggtgaacctttggaagttaatagattatgtgatgctgttaacgttttattgtctttgcagaacgacaatggtggtttcgcctcctatgaattaaccagatcatacccatggttggaattgattaacccagctgagaccttcggtgatatcgttatcgactacccatatgttgaatgtacctctgctactatggaagccttaacattgtttaagaaattacacccaggtcatagaacaaaggaaattgatataggtagagctgtcgaatttttggagaagatgcaaagagcagacggttcctggtatggttgttggggtgtttgcttcacttacgcaggttggttcggtatcaagggattggtcgctgctggtagaacctataattcctgtttggctattagaaaggcttgcgaatttttgttatctaaagaattacctggtggtggttggggtgaatcctacttgtcctgtcagaacaaggtttacacaaatttggaaggtaacaagccacacttggttaatactgcatgggtcttgatggcattaattgaggccggtcaagctgaacgtgatcctaccccattacacagagctgctaaaatcttaattaattctcaaatggaagacggtgatttcccacaagaagagatcatgggtgtttttaacaagaactgtatgatctcttactccgcttacagaaacattttcccaatatgggccttgggtgaatatcattgtcgtgtcttgcaggcaccataa

SEQ ID NO: 224 - protein, 756 aa, Spinacia oleracea
MWRLKIAEGGSPWLRTTNNHVGRQIWEFDPNLGTPEQIREVEEARENFWKNRFEQKHSSDLLMRMQFAQENSSNVVLPQVKVKDEDEITKEAVKSTLERALSFYSAVQTSDGNWASDLGGPMFLLPGLVIALSVTGALNAVLSKEHQKEMCRYLYNHQNKDGGWGLHIEGHSTMFGTVLTYVTLRLLGEGVDDGDGAMERGRKWTLEHGSATAITSWGKMWLSVLGVFEWAGNNPMPPETWLLPYILPVHPGRMWCHCRMVYLPMSYLYGKRFVGPITPTVLSLRRELFDVPYHEIDWDRARNECAKEDLYYPHPLVQDILWASLHKAVEPILMRWPGKKLREKALSTVMEHIHYEDENTRYICLGPVNKVLNLLCCWVEDPYSDAFKLHLQRVHDYLWVAEDGMKMQGYNGSQLWDTAFSIQAILATNLGEEYGGTLRKAHNFIKDSQIQEDCPGDPNVWFRHIHKGAWPFSTRDHGWLISDCTAEGLKASLMLSKLPSTMVGEPLEVNRLCDAVNVLLSLQNDNGGFASYELTRSYPWLELINPAETFGDIVIDYPYVECTSATMEALTLFKKLHPGHRTKEIDNCIKKAAKFLEKMQRADGSWYGCWGVCFTYAGWFGIKGLVAAGRTYNSCLAIRKACEFLLSKELPGGGWGESYLSCQNKVYTNLEGNKPHLVNTAWVLMALIEAGQAKRDPMPLHRAAKVLINSQMPNGDFPQQEIMGVFNRNCMITYAAYRNIFPTWALGEYRTQVLQK

SEQ ID NO: 225 - protein, 761 aa, Aquilaria agallocha
MWRLKTGSETVGDNGRWLRSTNNHVGRQVWEFFPEMGSPEELVAIEAAHREFHLNRFHKQHSSDLLMRLQYEREKPCVQKEGAVRLDATETPTEAAVETTLRRALTFYSTMQSDDGNWASDLGGPMFLLPGLVIALYVTGVLNSVLSKEHQREIRRYLYNHQNQDGGWGLHIEGPSTMFGSALNYVTLRLLGEGPDDGEGAMERARQWILSRGGAVAVTSWGKLWLSVLGVYEWDGNNPLPPELWLLPYSLPLHPGRMWCHCRMVYLPMSYLYGKRFVGPITPTVLSLREELYPIPYHHVDWNKARNTCAQDDLYYPHPFVQDLLWGSLYHVYEPLVMRWPGKRLRERALQHVMKHIHYEDENSRYICLGPVNKALNMLCCWVEDPHSEAFKMHIPRIYDYLWIAEDGMRMQGYNGSQLWDTAFSVQAIVATKLTDEFSETLAKANKYILDAQILKNCPGDPNVWFRHIHKGAWPFSTRDHGWLISDCTAEGLKASLMLSKLPSKIVGEPLEKNRLYDAVNVLLSLQNENGGFASYELTRSYPWLELINPAETFGDIVIDYTYVECTSATMEALTLFKKLHPGHRKKEIERCMANAAKFLEMRQEADGSWYGCWGVCYTYAGWFGIKGLVAAGRTYNNCANIRRACDFLLSKQLPNGGWGESYLSCQNKLYTNLNNDRMHTVNTAWAMMALIEAGQAKTDPMPLHHAARTLINAQMETGDFPQQEIMGVFNKNCMITYAAYRNVFPVWALGEYHHRVLNGC

SEQ ID NO: 226 - protein, 761 aa, Aquilaria agallocha
MWRLKTGSETVGDNGRWLRSTNNHVGRQVWEFFPEMGSPEELVAIEAAHREFHLNRFHKQHSSDLLMRLQYEREKPCVQKEGAVRLDATETPTEAAVETTLRRALTFYSTMQSDDGHWANDLGGPMFLLPGLVITLTITGTINVVLSKEHQREIRRYLYNHQNQDGGWGLHIEGPSTMFGSALNYVTLRLLGEGPDDGEGAMERARQWILSRGGAVAVTSWGKLWLSVLGVYEWDGNNPLPPELWLLPYSLPLHPGRMWCHCRMVYLPMSYLYGKRFVGPITPTVLSLREELYPIPYHHVDWNKARNTCAQDDLYYPHPFVQDLLWGSLYHVYEPLVMRWPGKRLRERALQHVMKHIHYEDENTEYICLGPVNKALNMLCCWVEDPHSEAFKMHIPRIYDYLWIAEDGMKMQGYNGSQLWDTAFAVQAIVATKLTDEFSETLAKANKYILDAQILKNCPGDPNVWYRHITKGAWSFSTADQGWLVSDCTAEGLKALLLYSMLPHQKAPSSIEKNRLYDAVNVLLSMQNADGGFASFELTRSYPWLEMINPAETFGDIVIDYTYVECTSAVIQALALFKRLHPGHRKKEIERCMANAAKFLEMRQEADGSWYGCWGVCYTYAGWFGIKGLTSCGRTYNNCANIRRACDFLLSKQLPNGGWGESYLSCQNKLYTNLNNDRMHTVNTAWAMMALIEAGQAKTDPMPLHHAARTLINAQMETGDFPQQEIMGVFNKNCMISYAGYRNVFPVWALGEYHHRVLNGC

SEQ ID NO: 227 - protein, 741 aa, Aquilaria agallocha
MWRLKIAEGKEGPYLKSTNNFVGRQTWEFDPDAGTPEERAAVEEARRAFYSNRYRVKPPADLLWRLQFMREKNFKQIIPMVRIKDGEAITHEKATATLRRAVHFLTVLQSIDGHWPAENAGCHYFLPPLVFCLYITGHLSSVFSQEHQREILRYIYNHQNEDGGWGLHIEGHSIMFSTALSYICLRILGEGLEGGQDNACAKAQKWILDHGSVTHIPSWGKTWLSVLGLFDWSGSNPIPPEFWMLPSFLPIHPGKIWSYCRTTYMPMSYLYGKKFVAPITPLIIQLRKELYLQPYDEINWRKVRHLCAKEDLYYPHPVIQDLMWDCLYVFTEPLLNRWPLNKMIREKALKVTMNHIHYEDENSSYINMACVGKVLCTLACWVEDPNGDYFKKHLARIPDYIWVAEDGMTMQGLASQTWDSGLAIQALFASNLIDEIGPTLKRAHDFIKKSQVLDNPFGDFKKMFRHSSKGSWTFSVRDHGWPVSDCTAEGLKCCLLLSMLPQEIVGEKLEVERLHDAVNIIFHLQSKNGGVAAWEPVRASKWLELLNPIEFLEDIVVDHEYLECTASSIDALQLFKKLYPTCEREEIENFILKAVEYIENIQMSDGSWYGNWGVCFIYGTLFALKGLAKAGKTYDDCVAMRKGVDFLLRIQRDDGGWGESYKSCPNKKFEPLQREGSNVVQTAWAILGLIESRQIMRDPTPLHRAIKFIINSQLEDGDFPQQVRGLSYIYSSLSFLPVIKM

SEQ ID NO: 228 - protein, 766 aa, Benicasa hispida
MWRLKIGADTVLTDPSNAGGRWLSTLSNHLGRQVWEFCAELGSPEDLQQIQHARQRFSDHRFEKKHSTDLLMRMQFAKENSSFVNLPQIKVKDKEDVTEEAVTRTLKRAINFYSTIQAHDGNWASDLGGPMFLLPGLVIALYVTGVLNSVLSTEHQREICRYLYNHQNRDGGWGLHIEGPSTMFGSVLNYVTLRLLGEEAEDGQGGVDKARKWILDHGGATAITSWGKMWLSVLGVYEWAGNNPLPPELWLLPYLLPCHPGRMWCHCRMVYLPMCYLYGKRFVGPITPIIRSLRKELYLVPYHEVDWNVARNQCAKEDLYYPHPLVQDVLWASLHHVYEPLFMCWPAKRLREKALRTVMQHIHYEDENSRYICLGPVNKVLNMLCCWVEDPHSEAFKLHIPRLYDYLWIAEDGMRMQGYNGSQLWDTAFSVQAIMSTKLSEEYGTTLRKAHKYIQDSQVQEDCPGDPNVWFRHIHKGAWPFSTRDHGWLISDCTAEGLKASLMLSKLPSKIVGEPLEKERLYDAVNVLLSLQNENGGFASYELTRSYPWLELINPAETFGDIVIDYPYVECTSAAIQALAAFKKLYPGHRSNEIGNSIAKAADFIESIQATDGSWYGSWGVCFTYAGWFGIKGLVAAGRTYNSCSSLRKACDFLMSKELAAGGWGESYLSCQDKVYTNIKDDRPHLVNTGWAMLSLIDAGQAERDPTPLHRAARILINSQMEDGDFPQEEIMGVFNKNCMITYAAYRNIFPIWALGEYRCRVLQAS

SEQ ID NO: 229 - protein, 764 aa, Citrullus colocynthis
MWRLKVGAESVGEKEEKWLKSISNHLGRQVWEFCAHQPTASPNHLQQIDNARNHFRNNRFHRKQSSDLFLAIQNEKEIANVTKGGGIKVKEEEDVRKETVKNTVERALSFYSAIQTNDGNWASDLGGPMFLLPGLVIALYVTGVLNSVLSKHHRQEMCRYLYNHQNEDGGWGLHIEGTSTMFGSALNYVALRLLGEDADGGEGGAMTKARSWILDRGGATAITSWGKLWLSVLGVYEWSGNNPLPPEFWLLPYCLPFHPGRMWCHCRMVYLPMSYLYGKRFVGPITPIVLSLRKELYTIPYHEIDWNRSRNTCAKEDLYYPHPKMQDILWGSIYHLYEPLFTRWPGKRLREKALQMAMKHIHYEDENSRYICLGPVNKVLNMLCCWVEDPYSDAFKFHLQRVPDYLWVAEDGMRMQGYNGSQLWDTAFSVQAIISTKLIDSFGTTLKKAHDFVKDSQIQQDCPGDPNVWFRHIHKGAWPFSTRDHGWLISDCTAEGLKASLMLSKLPSKIVGEPLEKSRLCDAVNVLLSLQNENGGFASYELTRSYPWLELINPAETFGDIVIDYPYVECTSATMEALTLFKKLHPGHRTKEIDIAVARAANFLENMQRTDGSWYGCWGVCFTYAGWFGIKGLVAAGRTYNSCVAIRKACDFLLSKELPGGGWGESYLSCQNKVYTNLEGNRPHLVNTAWVLMALIEAGQAERDPAPLHRAARLLINSQLENGDFPQEEIMGVFNKNCMITYAAYRNIFPIWALGEYFHRVLTE

SEQ ID NO: 230 - protein, 764 aa, Citrullus colocynthis
MWRLKVGAESVGEKEEKWLKSISNHLGRQVWEFCADQPTASPNHLQQIDNARKHFRNNRFHRKQSSDLFLAIQNEKEIANGTKGGGIKVKEEEDVRKETVKNTVERALSFYSAIQTNDGNWASDLGGPMFLLPGLVIALYVTGVLNSVLSKHHRQEMCRYLYNHQNEDGGWGLHIEGTSTMFGSALNYVALRLLGEDADGGEGGAMTKARGWILDRGGATAITSWGKLWLSVLGVYEWSGNNPLPPEFWLLPYCLPFHPGRMWCHCRMVYLPMSYLYGKRFVGPITPIVLSLRKELYTIPYHEIDWNKSRNTCAKEDLYYPHPKMQDILWGSIYHLYEPLFTRWPGKRLREKALQMAMKHIHYEDENSRYICLGPVNKVLNMLCCWVEDPYSDAFKFHLQRVPDYLWIAEDGMRMQGYNGSQLWDTAFSVQAIISTKLIDSFGTTLKKAHDFVKDSQIQQDFPGDPNVWFRHIHKGAWPFSTRDHGWLISDCTAEGLKASLMLSKLPSKIVGEPLEKSRLCDAVNVLLSLQNENGGFASYELTRSYPWLELINPAETFGDIVIDYPYVECTSATMEALTLFKKLHPGHRTKEIDTAVAKAANFLENMQRTDGSWYGCWGVCFTYAGWFGIKGLVAAGRTYSTCVAIRKACDFLLSKELPGGGWGESYLSCQNKVYTNLEGNRPHLVNTAWVLMALIEAGQAERDPAPLHRAARLLINSQLENGDFPQEEIMGVFNKNCMITYAAYRNIFPIWALGEYFHRVLTE

SEQ ID NO: 231 - protein, 764 aa, Cucurbita maxima
MWRLKVGAESVGEKDEKWVKSVSNHLGRQVWEFCADAAADTPHQLLQIQNARNHFHHNRFHRKQSSDLFLAIQYEKEIAKGAKGGAVKVKEGEEVGKEAVKSTLERALGFYSAVQTSDGNWASDLGGPMFLLPGLVIALHVTGVLNSVLSKHHRVEMCRYLYNHQNEDGGWGLHIEGTSTMFGSALNYVALRLLGEDADGGDGGAMTKARAWILERGGATAITSWGKLWLSVLGVYEWSGNNPLPPEFWLLPYSLPFHPGRMWCHCRMVYLPMSYLYGKRFVGPITPKVLSLRQELYTIPYHEIDWNKSRNTCAKEDLYYPHPKMQDILWGSIYHVYEPLFTRWPGKRLREKALQAAMKHIHYEDENSRYICLGPVNKVLNMLCCWVEDPYSDAFKLHLQRVHDYLWVAEDGMRMQGYNGSQLWDTAFSIQAIVATKLVDSYAPTLRKAHDFVKDSQIQEDCPGDPNVWFRHIHKGAWPFSTRDHGWLISDCTAEGLKASLMLSKLPSTMVGEPLEKNRLCDAVNVLLSLQNDNGGFASYELTRSYPWLELINPAETFGDIVIDYPYVECTAATMEALTLFKKLHPGHRTKEIDTAIGKAANFLEKMQRADGSWYGCWGVCFTYAGWFGIKGLVAAGRTYNSCLAIRKACEFLLSKELPGGGWGESYLSCQNKVYTNLEGNKPHLVNTAWVLMALIEAGQGERDPAPLHRAARLLMNSQLENGDFVQQEIMGVFNKNCMITYAAYRNIFPIWALGEYCHRVLTE

SEQ ID NO: 232 - protein, 774 aa, Cucumis melo
MWRLKVGKESVGEKEEKWIKSISNHLGRQVWEFCSGENENDDDEAIAVANNSASKFENARNHFRNNRFHRKQSSDLFLAIQCEKEIIRNGAKNEGTTKVKEGEDVKKEAVKNTLERALSFYSAVQTSDGNWASDLGGPMFLLPGLVIALYVTGVLNSVLSKHHRQEMCRYIYNHQNEDGGWGLHIEGSSTMFGSALNYVALRLLGEAADGGEHGAMTKARSWILERGGATAITSWGKLWLSVLGVYEWSGNNPLPPEFWLLPYSLPFHPGRMWCHCRMVYLPMSYLYGKRFVGPITPIVLSLRKELYTIPYHEIDWNRSRNTCAKEDLYYPHPKMQDILWGSIYHVYEPLFSGWPGKRLREKAMKIAMEHIHYEDENSRYICLGPVNKVLNMLCCWVEDPYSDAFKFHLQRIPDYLWLAEDGMRMQGYNGSQLWDTAFSIQAIISTKLIDTFGPTLRKAHHFVKHSQIQEDCPGDPNVWFRHIHKGAWPFSTRDHGWLISDCTAEGLKASLMLSKLPSKIVGEPLEKNRLCDAVNVLLSLQNENGGFASYELTRSYPWLELINPAETFGDIVIDYSYVECTSATMEALALFKKLHPGHRTKEIDAAIAKAANFLENMQKTDGSWYGCWGVCFTYAGWFGIKGLVAAGRTYNNCVAIRKACNFLLSKELPGGGWGESYLSCQNKVYTNLEGNKPHLVNTAWVMMALIEAGQGERDPAPLHRAARLLINSQLESGDFPQQEIMGVFNKNCMITYAAYRNIFPIWALGEYSHRVLDM

SEQ ID NO: 233 - protein, 723 aa, Coccinia grandis
MWRLKLGKGENEDYLFSTNDFIGRQTWEFDPNAGTPQERAQVEAARLNFYQNRNHVQCSSDLLWRFQFLEEKNFKQAIPKVVVEERNGNDRELSIKKETVKTALRRATNFFAALQSNHGHWPAENAGPLYYLPPLVFALYITRDLNTILSKEHQKEILRYVYCHQNEDGGWGLHIASRQSCMLCTVLNYIELRLLGEEADNEACSRARKWILDHGGALYIPSWGKIWLSILGLYEWEGTNPMPPEIWMFGKILPWNLGGLLCYTRLTLLPMSYLYGKRFVGPLTPLILQLRHEIYTQPYNDIKWSPARHLCAKEDEYFERSIFQKLVWDVVTYVGEPILKSWAFKKIRNRAIQIAKWYMDYEDQNSHYITIGCVEKPLFTLTSWVVDPHGEAYKKHLARIKDYLWVGEDGMKMQSFGSQSWDVAFAIQAILATNLHHEFSETLKKGHDFIKQSQVKKNPSGDFPRMYRHISKGSWTFSDQDHGWGVSDCAAENLLCCLKLSTMPSHIVGDSMEPQCFFEAVNFILSLQAKDGGLSAWEPAGTLPLWFEVLNPVEFFEYTVLEIECVECTSSAIQALVLFKKLFPSHRKKEIDNFIEKATNYIKEIQKEDGSWYGNWGICHIYGTYFAIKGLAAAGNTYENCSTVTKAVDFLLKIQCPDGGWGESHISCLNKVHTPLPGNASNLVQTSFALMSLIHSQQVCFFLFFFFPSFLPICTLPSLIIIF

SEQ ID NO: 234 - protein, 765 aa, Coccinia grandis
MWRLKVGADTVPADPSKSGGWLSTLSNHLGRQVWEFCAELGSPEDLQQIQHARQHFSDHRFEKKHSADLLMRMQFAKENSSFVNLPQIKVKDKEDVMEEAVTRTLKRAINFYSTIQADDGNWASDLGGPMFLLPGLVIALYVTGVLNSVLSTEHQREICRYLYNHQNRDGGWGLHIEGPSTMFGSVLNYVTLRLLGEEAEDGEGGVDKARKWILDHGGATAITSWGKMWLSVLGVYEWTGNNPLPPELWLLPYLLPVHPGRMWCHCRMVYLPMCYLYGKRFVGPITPIIRSLRKELYLVPYHEVDWNEARNLCAKEDLYYPHPLVQDILWASLHHVYEPLFMRWPAKRLREKALRTVMQHIHYEDENSRYICLGPVNKVLNMLCCWVEDPHSEAFKLHIPRVYDYLWIAEDGMRMQGYNGSQLWDTAFSVQAIISTKLAEEYGTTLRKAHEYIKDSQVLEDCPGDPNVWFRHIHKGAWPFSTRDHGWLISDCTAEGLKASLMLSKLPSKIVGEPLEKERIYDSVNVLLSLQNENGGFASYELTRSYPWLELINPAETFGDIVIDYPYVECTSAAIQALAAFKKLYPGHRSNEIGNCIAKAADFIESIQATDGSWYGSWGVCFTYAGWFGIKGLVAAGRTYNNCLSLRKACDFLLSKELAGGGWGESYLSCQDKVYTNIKDDRPHIVNTGWAMLSLIEVGQAERDPTPLHRAARILINSQMDDGDFPQEEIMGVFNKNCMITYAAYRNIFPIWALGEYRCRVLQAP

SEQ ID NO: 235 - protein, 785 aa, Cucumis sativus
MWRLKVGKESVGEKEEKWIKSISNHLGRQVWEFCAENDDDDDDEAVIHVVANSSKHLLQQQRRQSSFENARKQFRNNRFHRKQSSDLFLTIQYEKEIARNGAKNGGNTKVKEGEDVKKEAVNNTLERALSFYSAIQTGDGNWASDLGGPMFLLPGLVIALYVTGVLNSVLSKHHRQEMCRYIYNHQNEDGGWGLHIEGSSTMFGSALNYVALRLLGEDANGGECGAMTKARSWILERGGATAITSWGKLWLSVLGVYEWSGNNPLPPEFWLLPYSLPFHPGRMWCHCRMVYLPMSYLYGKRFVGPITPMVLSLRKELYTIPYHEVDWNRSRNTCAQEDLYYPHPKMQDILWGSIYHVYEPLFNGWPGRRLREKAMKIAMEHIHYEDENSRYICLGPVNKVLNMLCCWVEDPYSDAFKFHLQRIPDYLWLAEDGMRMQGYNGSQLWDTAFSIQAILSTKLIDTFGSTLRKAHHFVKHSQIQEDCPGDPNVWFRHIHKGAWPFSTRDHGWLISDCTAEGLKASLMLSKLPSKIVGEPLEKNRLCDAVNVLLSLQNENGGFASYELTRSYPWLELINPAETFGDIVIDYSYVECTSATMEALALFKKLHPGHRTKEIDAALAKAANFLENMQRTDGSWYGCWGVCFTYAGWFGIKGLVAAGRTYNNCVAIRKACHFLLSKELPGGGWGESYLSCQNKVYTNLEGNRPHLVNTAWVLMALIEAGQGERDPAPLHRAARLLINSQLENGDFPQQEIMGVFNKNCMITYAAYRNIFPIWALGEYSHRVLTE

SEQ ID NO: 236 - protein, 764 aa, Cucurbita foetidissima
MWRLKVGAESVGEKDEKWVKSVSNHLGRQVWEFCADADAVTPHQSLQIHNARNHFHQNRFRRKQSSDLFLAIQYEKEIAKGVKVGAVKVKEGEEVGKEAVKSTLERALSFYSAVQTSDGNWASDLGGPMFLLPGLVIALYVTGVLNSVLSKHHRLEMCRYLYNHQNEDGGWGLHIEGTSTMFGSALNYVALRLLGEDADGGDGGAMTKARAWILERGGATAITSWGKLWLSVLGVYEWSGNNPLPPEFWLLPYSLPFHPGRMWCHCRMVYLPMSYLYGKRFVGPITPKVLSLRQELYTVPYHEIDWNKSRNTCAKEDLYYPHPKMQDILWGSIYHVYEPLFTRWPGKRLREKALQTAMKHIHYEDENSRYICLGPVNKVLNMLCCWVEDPYSDAFKLHLQRVHDYLWVAEDGMRMQGYNGSQLWDTAFSIQAIVATKLVDSYGPTLRKAHDFVKDSQIQEDCPGDPNVWFRHIHKGAWPFSTRDHGWLISDCTAEGLKASLMLSKLPSTMVGEPLEKSRLCDAVNVLLSLQNDNGGFASYELTRSYPWLELINPAETFGDIVIDYPYVECTAATMEALTLFKKLHPGHRTKEIDTAIAKAANFLEKMQRTDGSWYGCWGVCFTYAGWFGIKGLVAAGRTYNSCVAIRKACEFLLSKELPGGGWGESYLSCQNKVYTNLEGNKPHLVNTAWVLMALIEAGQGERDPAPLHRAARLLMNSQLENGDFLQQEIMGVFNKNCMITYAAYRNIFPIWALGEYCHRVLTE

SEQ ID NO: 237 - protein, 765 aa, Cucumis melo
MWQLKVGADTVPSDPSNAGRWLSTLNNHVGRQVWHFHPELGSPEDLQQIQNARQHFYDHRFEKKHSSDILMRMQFAKENSSFVNLPQIKVKEKEDVVEEAVTQTLRRAMNFYSTIQADDGHWPGDYGGPMFLLPGLVITLSITGALNAVLSTEHQREICRYLYNHQNRDGGWGLHIEGPSTMFGSVLSYVTLRLLGEEAEDGQGGVENARKWILDHGGATAITSWGKMWLSVLGVYEWAGNNPLPPELWLLPYLLPFHPGRMWCHCRMVYLPMCYLYGKRFVGPITPIIRSLRKELYLVPYHEIDWNEARNQCAKEDLYYPHPLVQDVLWASLHHVYEPLFMRWPAKRLREKALRTVMQHIHYEDENTRYICIGPVNKVLNMLCCWVEDPHSEAFKLHIPRIYDYLWLAEDGMKMQGYNGSQLWDTAFAVQAIMSTKLVEEYGTTLRKAHKYIKDSQVLEDCPGDLQSWYRHISKGAWPFSTADHGWPISDCTAEGLKAVVLLSKLPSEIVGKPVDEERMYDAVNVILSLQNTDGGFATYELTRSYRWLELMNPAETFGDIVIDYPYVECTSAAIQALAAFRKLYPGHRSNEIGNCIAKAADFIESIQATDGSWYGSWGVCFTYGGWFGIKGLVAAGRRYENSSSLRKACDYLLSKELPAGGWGESYLSCQDKVYTNIKDDRPHLVNTAWAMLSLIDAGQAERDPTPLHRAARILINSQMEDGDFPQEDIMGVFNKNCMISYSAYRNIFPIWALGAYRCRVLLAS

SEQ ID NO: 238 - protein, 765 aa, Cucumis metuliferus
MGEMWKLKFSKGWETSENDHVGRQYWEFDTNLTPSEEEKAQIQKFYNEFYNYRFQAKHSSDLLMRFQLRKENNGGEVKLPTQIKITGEEEINEEAIEKTLRRGIRFYSTLQTQDGFWPGDYGGPLFLLPALVIGLSVTKALDTAISVHHRHEMCRYLYNHQNEDGGWGLHIEGNSTMLCTALSYVSLRLLGEKMDGRDGVLLKARRWILDRGGATSIPSWGKTWLSVLGVYEWEGNNPLPPEIWLLPYSLPLHPGRMWCHSRMVYLPMSYLYGKRFVGPISPIIISLRRELYTCSYHTIDWNLSRNLCAKEDLYTPHSKIQNILWNSIHKFGEPLLKKWPLSKVRQKALDFVIQHIHYEDENTHYLCLGPISKVLNMVCCWAEDPNSEAFRRHIPRIKDYLWLAEDGMKMQGYNGSQLWDVVFAVQAILATDLVDEYGSVLKKAHNFIKNSQMKRNGIKDQNNPSVWYRHMSKGGWPFSTPDNAWPVSDCTAEALKAAILLSQMPTTMVGEPIDVHNLYDAVNLILSLQNSNGGFASYELTRSYPWLEMLNPAEIFGDVMIDYQYVECTSAAIQGLKAFMKLHPGYRKKDIQTCISKAAHFIETIQLPDGSWYGSWGICYTYGTWFGIKGLVACGRTYANSKCIRKATQFLLSKQLKSGGWGESYLSAHHKVYADLKDGKSHIVNTSWALLALIQADQAQRDPSPLHRAATVLINSQMDDGDFPQQEIMGVFNKSCMISYAAYRNIFPIWALGEYRIRVLQLPEN

SEQ ID NO: 239 - protein, 766 aa, Cucurbita pepo
MWRLKIGADTVPSDPSNAGGWLSTLSNHLGRQVWEFCAELGSPEDLQQIQQARQRFSDHRFEKKHSADLLMRMQFAKENSSFVNLPQVKVKDKEEVSEEAVTRTLRRAINFYSTIQADDGNWASDLGGPMFLLPGLVIALYVTGVLNSVLSTEHQREICRYLYNHQNRDGGWGLHIEGPSTMFGSVLNYVTLRLLGEEAEDGQGAVDKARKWILDHGGAAAITSWGKMWLSVLGVYEWAGNNPLPPELWLLPYLLPCHPGRMWCHCRMVYLPMCYLYGKRFVGPITPIIRSLRKELYLVPYHEVDWNKARNQCAKEDLYYPHPLVQDILWASLHHVYEPLFMHWPAKRLREKALQSVMQHIHYEDENSRYICLGPVNKVLNMLCCWAEDPHSEAFKLHIPRIYDYLWIAEDGMRMQGYNGSQLWDTAFSVQAIISTELAEEYETTLRKAHKYIKDSQVLEDCPGDPNVWFRHIHKGAWPFSTRDHGWLISDCTAEGLKASLMLSKLPSKIVGEPLEKQQLYNAVNVLLSLQNENGGFASYELTRSYPWLELINPAETFGDIVIDYPYVECSSAAIQALAAFKKLYPGHRRDEINNCIAKAADFIESIQATDGSWYGSWGVCFTYAGWFGIKGLVAAGRTYNNCSSLRKACDFLLSKELAAGGWGESYLSCQNKVYTNIKDDRPHIVNTGWAMLSLIDAGQSERDPTPLHRAARVLINSQMEDGDFPQEEIMGVFNKNCMITYAAYRNIFPIWALGEYRSRVLKLLK

SEQ ID NO: 240 - protein, 762 aa, Cucurbita pepo
MWRLKIADGGNDPYIYSTNDFIGRQTWEFDPEAGTPEERQEVEEARHHFYRNRYKVKPSADCLWRMQFLREKKFKQEIGAVKIKEGEEISQDKARIALRRAVHFYSALQASDGHWPAENAGPLFFLPPLVMCLYITGHLDQVFPEEHKKEILRYIYCHQNEDGGWGLHIEGHSTMFCTALSYICMRILGEGPDGGLNNACARGRKWILDHGSVTYIPSWGKTWLSILGVYDWAGSNPMPPEFWLLPSFLPMHPAKMWCYCRMVYMPMSYLYGKRFVCQITPLIQELRLELHAQPFDEINWKKTRHLCTKEDVYYPHPLMQDLLWDSLYICTEPLLTRWPFNKLVREKALQVTMKHIHYEDDNSRYITIGCVEKVLCMLACWVEDPDGDYFKKHLARIPDYIWVAEDGMKMQSFGSQEWDTGFAIQALLAADMADEIGPVLARGHDFIKKSQVKDNPSGNFKTMHRHISKGSWTFSDQDHGWQVSDCTAEALKCCLLFSLMRPEIVGDKMEAQRLYDSVNVLLSLQSKNGGLAAWEPATGQKWLEMLNPTEFFADIVIEHEYVECTASAIQALILFKKLHPGHRTKEIDNFIQNAVRYLQDIQMPDGSWYGNWGVCFTYGCWFALGGLVAAAKTFNNCAAIRKGVHFLLNIQMPDGGWGESYHCCPSKKYVPLEGKRSNLVHTAWAMMALIHSGQAERDPTPLHRAAKLLINSQTEDGDFPQQEITGVFMKNCMLHYAAYRNIYPLWALAEYSKRVKLASTSP

SEQ ID NO: 241 - protein, 762 aa, Cucurbita pepo
MWRLKVADGGNDPYIYSMNNFVGRQIWEFDPDAGSPDERAEVERVRNEFTKNRLKGFPSADLLWRLQLLREKNFKQSIPPVKVEDGEEITYEMASDAMKRGAYFLEAIQASDGHWPSETSGPLFYLCPLLICMYIMGFMDSAFSPEHKKEMMRYLYNHQNEDGGWGLHVGGHSNMFCTTFNYISLRLLGEEPDVEAVAKGRIWIRDHGGVTSILSWGKTWLSILNLFDWSASNPMPPEYWMFPTWVPIHPSNMMCYTRITYMPMSYLYGKRFQAPLTPLVLQLRDELHTQAYEKINWRKVRHMCATEDLYFPHPFVQDLLWDTLYMLSEPLMTRWPFNKLIRQKALDETMRHIHYEDENSRYITIGCVEKPLCMLACWVEDPNSEYVKKHFARIPDYLWMAEDGMKMQSFGSQSWDAALAMQALLACNITHDIGSALNNGHEFIKNSQVRNNPPGDYKSMFRYMSKGSWTFSDCDHGWQVSDCTAENLKCCLLLSLLPPEIVGEKMEPQRFYDAVNVILNMQSKNGGLPAWEPASSYYWMEWLNPVEFLEDLIIEHQHVECTSSALQAILLFRKQYPEHRKKEINNFINKAVQFLQDIQLPDGSWYGNWGICYTYGTWFALKALSMAGKTYENCEALRKGANFLIKIQNPEGGFGESYLSCPYKRYIPLDGKRSNLVQTAWGMMGLIAAGQADVDPGPIHRAAKLLINSQTEDGDFPQEEITGEFFKNCTLHFAAFREVFPVMALGEYCNKVPLPSKKNTIN

SEQ ID NO: 242 - protein, 759 aa, Cucurbita pepo
MWRLKVADGGNDPYIYSMSNHLGRQVWEFCADAGSPDERAEVERVRNEFTKNRLKGFPSADLLWRLQLLREKNFKQSIPPVKVEDGEEITYEMASDAMKRGAYFLEAIQASDGNWASDLGGPMFLLPGLVIALYVTGVLNSAFSPEHKKEMMRYLYNHQNEDGGWGLHVGGHSNMFCTTFNYISLRLLGEEPDVEAVAKGRIWIRDHGGVTSILSWGKTWLSILNLFDWSASNPMPPEYWMFPTWVPIHPSNMMCYTRITYMPMSYLYGKRFQAPLTPLVLQLRDELHTQAYEKINWRKVRHMCATEDLYFPHPFVQDLLWDTLYMLSEPLMTRWPFNKLIRQKALDETMRHIHYEDENSRYICLGPVEKPLCMLACWVEDPNSEYVKKHFARIPDYLWMAEDGMRMQGYNGSQLWDTAFSQALLACNITHDIGSALNNGHEFIKNSQVRNNPPGDPNVWFRHIHKGAWPFSTRDHGWLISDCTAEGLKASLMLSKLPSKIVGEPLEKYDAVNVLLSLQNENGGFASYELTRSYPWLELINPAETFGDIVIDYQHVECTSSALQAILLFRKQYPEHRKKEINNFINKAVQFLQDIQLPDGSWYGNWGICYTYAGWFGIKGLVAAGRTYNNCEALRKGANFLIKIQNPEGGFGESYLSCPYKRYIPLDGKRSNLVQTAWGMMGLIAAGQADVDPGPIHRAAKLLINSQTEDGDFPQEEIMGVFNKNCMITYAAFREVFPVMALGEYCNKVPLPSKKNTIN

SEQ ID NO: 243 - protein, 785 aa, Cucumis sativus
MWRLKVGKESVGEKEEKWIKSISNHLGRQVWEFCAENDDDDDDEAVIHVVANSSKHLLQQQRRQSSFENARKQFRNNRFHRKQSSDLFLTIQYEKEIARNGAKNGGNTKVKEGEDVKKEAVNNTLERALSFYSAIQTSDGNWASDLGGPMFLLPGLVIALYVTGVLNSVLSKHHRQEMCRYIYNHQNEDGGWGLHIEGSSTMFGSALNYVALRLLGEDANGGECGAMTKARSWILERGGATAITSWGKLWLSVLGVYEWSGNNPLPPEFWLLPYSLPFHPGRMWCHCRMVYLPMSYLYGKRFVGPITHMVLSLRKELYTIPYHEIDWNRSRNTCAQEDLYYPHPKMQDILWGSIYHVYEPLFNGWPGRRLREKAMKIAMEHIHYEDENSRYICLGPVNKVLNMLCCWVEDPYSDAFKFHLQRIPDYLWLAEDGMRMQGYNGSQLWDTAFSIQAILSTKLIDTFGSTLRKAHHFVKHSQIQEDCPGDPNVWFRHIHKGAWPFSTRDHGWLISDCTAEGLKASLMLSKLPSKIVGEPLEKNRLCDAVNVLLSLQNENGGFASYELTRSYPWLELINPAETFGDIVIDYSYVECTSATMEALALFKKLHPGHRTKEIDAALAKAANFLENMQRTDGSWYGCWGVCFTYAGWFGIKGLVAAGRTYNNCVAIRKACHFLLSKELPGGGWGESYLSCQNKVYTNLEGNRPHLVNTAWVLMALIEAGQGERDPAPLHRAARLLINSQLENGDFPQQEIMGVFNKNCMITYAAYRNIFPIWALGEYSHRVLTE

SEQ ID NO: 244 - protein, 758 aa, Vitis vinifera
MWRLKVADGGNDPYIDSTNNFVGRQIWEFDPDYGTPDERAEVEAARENFWKNRFQVKLSSDLLWRMQFARENPCVTNLPQIKVQDLEEVTEEVVTTTLRRGLNFYSTIQAHDGHWPGDCGGPMFLLPGLVITLYVTGALHVVLSIEQQREMCRYLCNHQNEDGGWGLHIEGPSTMFGTVLNYVTLRLLGEADFGAKGAMEKGQKWILDHGGATAITSWGKMWLSVLGAYEWFGTNPLPPEMWLCPYILPVHPGRMWCHCRMVYLPMSYLYGKKFVGPITSTIISLRKELYIVPYHEVDWNQARNQCAKEDLYYPHPLVQDILWASLHKVLEPILGHWPGNNLREKALCTVMQHVHYEDENTRYICLGPVNKVLNMLCCWIEDPNSEAFKLHIPRIFDYLWIAEDGMKMQGYSGSQLWDTSFAVQAIISTNLGEEYGLTLRKAHEFIKNSQVLEDCPGDLKFWYRHISKGAWPFSTADQGWPISDCTAEGLKAVLLLSKLPVETVGEPLDMKHLSDAVNVILSLQNADGGFATYELTRSYRWVELINPAETFGDIVIDYPYVECTSAAIQALTSFKKLYPEHRRHEIENCISKAAKFIEEIQAPDGSWYGCWGVCFTYGGWFGITGLIAAGNTYSNCPCIRKACDYLLSKELASGGWGESYLSCQNKVYTNLPGDKPHIVNTAWAMLALIEAGQAGRDPNPLHRAARILINSQMKNGDFPQEEIMGVFNKNCMINYSAYRNIFPIWALGEHRSRVLHSS

SEQ ID NO: 245 - protein, 786 aa, Gynostemma cardiospermum
MGNIKERKGKDRERQREMWKLKIGGESVGKNNEEKWLKSISNHLGRQVWEFCPKLETETETETESQIENARNTFHLNRFHKKQSSDLFITLQYGNEIAKIEGVKIKEKEEVREEAVKTTLERALNFYSAIQTSDGHWASDLGGPMFLLPGLVITLYVTGVLNSVLSKHHRQEICRYLYNHQNEDGGWGLHIEGPSTMFGSVLNYVALRLLAQDSEYDSILKGRRWILDHGGATGITSWGKLWLSVLGVYEWCGNNPLPPEFWILPYFLPFHPGRMWCHCRMVYLPMSYLYGKRFVGPITPTVLSLRKELYTVPYHEIDWNKSRNTCAKEDLYYPHPKIQDILWASLHHVYEPFFTRWPGKRLRDKALHAAMQHIHYEDENTRYICLGPVNKVLNMLCCWVEDPHSDAFKFHLQRVYDYLWVAEDGMKMQGYNGSQLWDTAFSVQAIISTKLTENFGPTLRKAHNFIKLSQIQQDCPGDPNIWYRHIHKGAWPFSTADHGWLISDCTAEGLKASLLLSKVSSNTVGEPLERNRLFDAVNVLLSLQNKNGGIASYELTRSYPWLELINPAETFGDIVIDYPYVECTSATIEALALFKKLYPGHRTKEIDNVIAKAAKFLEDMQREDGSWYGCWGVCFTYAGWFGIKGLVAAGRQYNNSPTIRKACNFILSKELPGGVGGWGESYLSCQNKVYTNLDGNRPHLVNTSWALMALIEAGQADRDPTPLHRAARLLINSQLENGDFPQQEIMGVFNKNCMITYAAYRNIFPIWALGEYCHRVLNQHRSSPLF

SEQ ID NO: 246 - protein, 769 aa, Gynostemma cardiospermum
MWKLKIGGESVGKNNEEKWLKSISNHLGRQVWEFCPKLETETETETESQIENARNTFHLNRFHKKQSSDLFITLQYGNEIAKIEGVKIKEKEEVREEAVKTTLERALNFYSAIQTSDGHWASDLGGPMFLLPGLVITLYVTGVLNSVLSKHHRQEICRYLYNHQNEDGGWGLHIEGPSTMFGSVLNYVALRLLAQDSEYDSILKGRRWILDHGGATGITSWGKLWLSVLGVYEWCGNNPLPPEFWILPYFLPFHPGRMWCHCRMVYLPMSYLYGKRFVGPITPTVLSLRKELYTVPYHEIDWNKSRNTCAKEDLYYPHPKIQDILWASLHHVYEPFFTRWPGKRLRDKALHAAMQHIHYEDENTRYICLGPVNKVLNMLCCWVEDPHSDAFKFHLQRVYDYLWVAEDGMKMQGYNGSQLWDTAFSVQAIISTKLTENFGPTLRKAHNFIKLSQIQQDCPGDPNIWYRHIHKGAWPFSTADHGWLISDCTAEGLKASLLLSKVSSNTVGEPLERNRLFDAVNVLLSLQNKNGGIASYELTRSYPWLELINPAETFGDIVIDYPYVECTSATIEALALFKKLYPGHRTKEIDNVIAKAAKFLEDMQREDGSWYGCWGVCFTYAGWFGIKGLVAAGRQYNNSPTIRKACNFILSKELPGGVGGWGESYLSCQNKVYTNLDGNRPHLVNTSWALMALIEAGQADRDPTPLHRAARLLINSQLENGDFPQQEIMGVFNKNCMITYAAYRNIFPIWALGEYCHRVLNQHRSSPLF

SEQ ID NO: 247 - protein, 759 aa, Siraitia grosvenorii
MWRLKVGAESVGENDEKWLKSISNHLGRQVWEFCPDAGTQQQLLQVHKARKAFHDDRFHRKQSSDLFITIQYGKEVENGGKTAGVKLKEGEEVRKEAVESSLERALSFYSSIQTSDGNWASDLGGPMFLLPGLVIALYVTGVLNSVLSKHHRQEMCRYVYNHQNEDGGWGLHIEGPSTMFGSALNYVALRLLGEDANAGAMPKARAWILDHGGATGITSWGKLWLSVLGVYEWSGNNPLPPEFWLFPYFLPFHPGRMWCHCRMVYLPMSYLYGKRFVGPITPIVLSLRKELYAVPYHEIDWNKSRNTCAKEDLYYPHPKMQDILWGSLHHVYEPLFTRWPAKRLREKALQTAMQHIHYEDENTRYICLGPVNKVLNLLCCWVEDPYSDAFKLHLQRVHDYLWVAEDGMKMQGYNGSQLWDTAFSIQAIVSTKLVDNYGPTLRKAHDFVKSSQIQQDCPGDPNVWYRHIHKGAWPFSTRDHGWLISDCTAEGLKAALMLSKLPSETVGESLERNRLCDAVNVLLSLQNDNGGFASYELTRSYPWLELINPAETFGDIVIDYPYVECTSATMEALTLFKKLHPGHRTKEIDTAIVRAANFLENMQRTDGSWYGCWGVCFTYAGWFGIKGLVAAGRTYNNCLAIRKACDFLLSKELPGGGWGESYLSCQNKVYTNLEGNRPHLVNTAWVLMALIEAGQAERDPTPLHRAARLLINSQLENGDFPQQEIMGVFNKNCMITYAAYRNIFPIWALGEYCHRVLTE

SEQ ID NO: 248 - protein, 765 aa, Lagenaria siceraria
MWRLKVGADTVPADPSNAGGWLSTLSNHLGRQVWEFCAELGSPEDLQQIQHARQRFSDHRFEKKHSADLLMRMQFAKENSSFVNLPQIKVKDKEDVIEEAVTRTLRRAINFYSTIQADDGNWASDLGGPMFLLPGLVIALYVTGVLNSVLSTEHQREICRYLYNHQNRDGGWGLHIEGPSTMFGSVLNYVTLRLLGEEAEDGQGGVDKARKWILDHGGATAITSWGKMWLSVLGIYEWAGNNPLPPELWLLPYLLPCHPGRMWCHCRMVYLPMCYLYGKRFVGPITPIIRSLRKELYLVPYHEVDWNEARNQCAKEDLYYPHPLVQDVLWASLHHVYEPLFMRWPAKRLREKALRSVMQHIHYEDENSRYICLGPVNKVLNMLCCWAEDPHSEAFKLHIPRIYDYLWIAEDGMRMQGYNGSQLWDTAFSVQAIISTKLAEEYGTTLRKAHKYIKDSQVLEDCPGDPNVWFRHIHKGAWPFSTRDHGWLISDCTAEGLKASLMLSKLPSKIVGEPLEKERIYDAVNVLLSLQNENGGFASYELTRSYPWLELINPAETFGDIVIDYPYVECTSAAIQALAAFKKLYPGHRSNEIGNCIAKAADFIESIQATDGSWYGSWGVCFTYAGWFGIKGLVAAGRTYNNCSSLRKACDFLLSKELAAGGWGESYLSCQDKVYTNIKDDRPHIVNTGWATLSLIDAGQAERDPTPLHRAARVLINSQMDDGDFPQEEIMGVFNKNCMITYAAYRNIFPIWALGEYRCRVLQAP

SEQ ID NO: 249 - protein, 758 aa, Linum usitatissimum
MWRLKIAEGGNPWLRTTNDHVGRQVWEFDPELGSPEELSAIELARRDFTKNRFEHKHSADLLMRIQFSKENPLERVLPQVKLKEKEDVTKEAVKSTLERALSFYSAVQTSDGNWASDLGGPMFLLPGLVIALSVTGAMNAVLSEQHKSEMRRYLYNHQNEDGGWGLHIEGPSTMFGSVLSYVTLRLLGEGANDGEGAMEKGRDWIVNHGGATAITSWGKMWLSVLGVFEWSGNNPLPPEIWLLPYMLPIHPGRMWCHCRMVYLPMSYLYGKRFVGPITPTVLSLRKELFSTPYHEIDWNRARNECAKEDLYYPHPLIQDLLWGSLHNFVEPILMAWPGKKLREKALRTTLEHIHYEDENTRYICLGPVNKVLNLLCCWVEDPYSDAFKLHLQRVHDYLWVAEDGMKMQGYNGSQLWDTAFSIQAILSTNLIEEYASTLKKAHAFVKDSQIQEDCPGDPNVWFRHIHKGAWPFSTRDHGWLISDCTAEGLKASLMLSKLPSTMVGEPLEANRLCDAVNVLLSLQNDNGGFASYELTRSYPWLELINPAETFGDIVIDYPYVECTSATMEALTLFKKLHPGHRTKEIDTCIKKAVAFLEKMQRADGSWYGCWGVCFTYAGWFGIKGLVAAGRTYNSCLAIRKACEFLLSKELPGGGWGESYLSCQNKVYTNLEGNKPHLVNTAWVLMALIEAGQAERDPAPLHRAARFLINSQMENGDFPQQEIMGVFNRNCMITYSAYRDIFPIWALGEYRTKVLHASS

SEQ ID NO: 250 - protein, 759 aa, Linum usitatissimum
MWRLKISEGGNPWLRTTNNHVGRQVWEFDPELGSPEELSAIELARRDFTKNRFEQKHSADLLMRIQFSKENPLERVLPQVKLREKEDVTKEAVKSTLERALSFYSAVQTSDGNWASDLGGPMFLLPGLVIALSVTGAMNAVLSEQHKSEMCRYLYNHQNEDGGWGLHIEGPSTMFGSVLSYVTLRLLGEGPNDGEGAMGKGRDWILNHGGATAITSWGKLWLSVLGVFEWSGNNPLPPEIWLLPYMLPIHPGRMWCHCRMVYLPMSYLYGKRFVGPITPTVLSLRKELFSTPYHEIDWNRARNECAKEDLYYPHPLIQDLLWGSLHNFVEPILMAWPGKKLREKALRTTLEHIHYEDENTRYICLGPVNKVLNLLCCWVEDPYSDAFKLHLQRVHDYLWVAEDGMKMQGYNGSQLWDTAFSIQAILSTNLVEEYASTLKKAHTYVKDSQIQEDCPGDPNVWFRHIHKGAWPFSTRDHGWLISDCTAEGLKASLMLSKLPSTMVGEPLEANRLCDAVNVLLSLQNDNGGFASYELTRSYPWLELINPAETFGDIVIDYPYVECTSATMEALTLFKKLHPGHRTKEIDTCIKKAVAFLEKMQRADGSWYGCWGVCFTYAGWFGIKGLVAAGRTYNSCLAIRKACEFLLSKELPGGGWGESYLSCQNKVYTNLEGNKPHLVNTAWVLMALIEAGQAERDPAPLHRAARFLINSQMENGDFPQQDIMGVFNRNCMITYAAYRDIFPIWALGEYRTKVLHASPS

SEQ ID NO: 251 - protein, 762 aa, Momordica charantia
MWRLKVGAESVGENDEKWVKSISNHLGRQVWEFCPDAGTPQQLLQIEKARKAFQDNRFHRKQTSDLLVSIQCEKGTTNGARVPGTKLKEGEEVRKEAVKSTLERALSFYSSIQTSDGNWASDLGGPMFLLPGLVIALCVTGALNSVLSKHHRQEMCRYLYNHQNEDGGWGLHIESPSTMFGSALNYVALRLLGEDADGGEGRAMTKARAWILGHGGATAITSWGKLWLSVLGVYEWSGNNPLPPEFWLLPYFLPFHPGRMWCHCRMVYLPMSYLYGKRFVGPITPVVLSLRKELYTVPYHEIDWNKSRNTCAKEDLYYPHSKMQDILWGSIHHMYEPLFTHWPAKRLREKALKTAMQHIHYEDENTRYICLGPVNKVLNMLCCWVEDPYSEAFKLHLQRVHDYLWVAEDGMKMQGYNGSQLWDTAFSVQAIISTKLVDNYGPTLRKAHDYVKNSQIQQDCPGEPNVWFRHIHKGAWPFSTRDHGWLISDCTAEGLKASLMLSKLPSETVGEPLERNRLCDAVNVLLSLQNDNGGFASYELTRSYPWLELINPAETFGDIVIDYPYVECTSATMEALALFKKLHPGHRTKEIDTAIARAADFLENMQRTDGSWYGCWGVCFTYAGWFGIKGLVAAGRAYSNCLAIRKACDFLLSKELPGGGWGESYLSCQNKVYTNLEGNRPHLVNTAWVLMALIEAGQGERDPAPLHRAARLLINSQLENGDFPQEEIMGVFNKNCMITYAAYRNIFPIWALGEYCHRVLTE

SEQ ID NO: 252 - protein, 703 aa, Momordica charantia
MGSNNFVGRKMWRLKLGEGANNPYLWSSNNFVGRQTWDFEADEGTPEERAQIEAARKTYFQNRFKVQCSNDLFWKFQVFAFYITGHLGTIFPEEHQKELLRYAYCHQNEDGGWGLYIMGESCMLCTVLNYIQLRLLGEEPDTDACNRARKWILDHGGALYIPSWGKIWLSILGVYEWDGANPMPPEFWLFGNALPLKPGHLLGYSRLTLLPMSYLYGKRFVGTLTPLILQLRQEIYTQPYSNIKWSPARHYCAKEDKCFERSWIQKLAWDAVHYLGEPLLGSWAFKSVRNRALQIARFHIDYEDQNSHYITIGCVEKPLCTLATWVDDPNGQAYKKHLARVKDYLWIGEDGMKIQSFGSQSWDVAFAIQAILATNFHREFSDTLKKGHDFIKKSQIRENPSGDFQSMYRHISKGSWSFSDQDHGWQLSDCTAENLTCCLILSTMPPDMVGDPMKPQCFFDAVNIILSLQAKNGGVSAWEPTGIVSSWFERLNPVEFLEYSILELEYVECTSSSLQALVLFKKLFPNHRKKEIETFITKGVNYIKEMQKDDGSWYGNWGICHLYATYFAIKGLVAVGYSYDSCSTIRRGVDFLLKIQCPDGGWGESHVSVTKKVYTPLQHNASNLVQTSFALMALIHAQQANRDPTPVHRAAKLLINSQLEDGDYPQQEITGAFMGNCMLHYPLYKNVFPLWALADYCNLVPLP

SEQ ID NO: 253 - protein, 756 aa, Pisum sativum
MWKLKVAEGGTPWLRTLNNHVGRQVWEFDPHSGSPQDLDDIETARRNFHDNRFTHKHSDDLLMRLQFAKENPMNEVLPKVKVKDVEDVTEEAVATTLRRGLNFYSTIQSHDGHWPGDLGGPMFLMPGLVITLSVTGALNAVLTDEHRKEMRRYLYNHQNKDGGWGLHIEGPSTMFGSVLCYVTLRLLGEGPNDGEGDMERGRDWILEHGGATYITSWGKMWLSVLGVFEWSGNNPMPPEIWLLPYALPVHPGRMWCHCRMVYLPMSYLYGKRFVGPITPTVLSLRKELFTVPYHDIDWNQARNLCAKEDLYYPHPLVQDILWATLHKFVEPVFMNWPGKKLREKAIKTAIEHIHYEDENTRYICIGPVNKVLNMLCCWVEDPNSEAFKLHLPRIYDYLWVAEDGMKMQGYNGSQLWDTAFAAQAIISTNLIDEFGPTLKKAHAFIKNSQVSEDCPGDLSKWYRHISKGAWPFSTADHGWPISDCTAEGLKAVLLLSKIAPEIVGEPLDSKRLYDAVNVILSLQNENGGLATYELTRSYTWLEIINPAETFGDIVIDCPYVECTSAAIQALATFGKLYPGHRREEIQCCIEKAVAFIEKIQASDGSWYGSWGVCFTYATWFGIKGLIAAGKNFSNCLSIRKACEFLLSKQLPSGGWAESYLSCQNKVYSNLEGNRSHVVNTGWAMLALIEAEQAKRDPTPLHRAAVCLINSQLENGDFPQEEIMGVFNKNCMITYAAYRCIFPIWALGEYRRVLQAC

SEQ ID NO: 254 - protein, 764 aa, Cucurbita pepo
MWRLKVGAESVGEEDEKWVKSVSNHLGRQVWEFCADAAADTPHQLLQIQNARNHFHHNRFHRKQSSDLFLAIQYEKEIAKGAKGGAVKVKEGEEVGKEAVKSTLERALGFYSAVQTRDGNWASDLGGPLFLLPGLVIALHVTGVLNSVLSKHHRVEMCRYLYNHQNEDGGWGLHIEGTSTMFGSALNYVALRLLGEDADGGDGGAMTKARAWILERGGATAITSWGKLWLSVLGVYEWSGNNPLPPEFWLLPYSLPFHPGRMWCHCRMVYLPMSYLYGKRFVGPITPKVLSLRQELYTIPYHEIDWNKSRNTCAKEDLYYPHPKMQDILWGSIYHVYEPLFTRWPGKRLREKALQAAMKHIHYEDENSRYICLGPVNKVLNMLCCWVEDPYSDAFKLHLQRVHDYLWVAEDGMRMQGYNGSQLWDTAFSIQAIVATKLVDSYAPTLRKAHDFVKDSQIQEDCPGDPNVWFRHIHKGAWPLSTRDHGWLISDCTAEGLKASLMLSKLPSTMVGEPLEKNRLCDAVNVLLSLQNDNGGFASYELTRSYPWLELINPAETFGDIVIDYPYVECTAATMEALTLFKKLHPGHRTKEIDTAIGKAANFLEKMQRADGSWYGCWGVCFTYAGWFGIKGLVAAGRTYNSCLAIRKACEFLLSKELPGGGWGESYLSCQNKVYTNLEGNKPHLVNTAWVLMALIEAGQGERDPAPLHRAARLLMNSQLENGDFVQQEIMGVFNKNCMITYAAYRNIFPIWALGEYCHRVLTE

SEQ ID NO: 255 - protein, 764 aa, Sechium edule
MWRLKVGAESVGEKDEKWVKSVSNHLGRQVWEFCADADAVTPHQSLQIHNARNHFHQNRFRRKQSSDLFLAIQYEKEIAKGVKVGAVKVKEGEEVGKEAVKSTLERALSFYSAVQTSDGNWASDLGGPMFLLPGLVIALYVTGVLNSVLSKHHRLEMCRYLYNHQNEDGGWGLHIEGSSTMFGSALNYVALRLLGEDVDGGDGGAMTKGRAWILDRGSATAITSWGKLWLSVLGVYEWSGNNPLPPEFWLLPYSLPFHPGRMWCHCRMVYLPMSYLYGKRFVGPITPIVLSLRKELYTVPYHEIDWNKSRNTCAKEDLYYPHPKVQDILWGTIHHVYEPLFSGWPCKRLREKALQTAMKHIHYEDENSNYICLGPVNKVLNMLCCWVEDPYSDAFKLHLQRIHDFLWVSEDGMKMQGYNGSQLWDTAFSIQAIASTKLVDTYGHSLRKAHNFVKNSQIQQDCPGDSNVWFRHIHKGAWPFSTRDHGWLISDCTAEGLKASLTLSKLPSQLVGEPLEKNRLYDAVNVLLSLQNENGGFASYELTRSYPWLELINPAETFGDIVIDYSYVECTAATMEALALFKKLHPGHRTKEIDTCIAKAANFLETMQRTDGSWYGCWGVCFTYAGWFGIKGLIAAGRTYKTCIAIRKACDFLLSKELPGGGWGESYLSCQNKVYTNLEGNRPHLVNTAWVLMALIEAGQAKRDQAPLHRAARLLINSQLENGDFPQQEIMGVFNKNCMITYAAYRNIFPIWALGEYYHRVLTK

SEQ ID NO: 256 - protein, 759 aa, Siraitia grosvenorii; identical to SEQ ID NO: 247

SEQ ID NO: 257 - protein, 759 aa, Siraitia grosvenorii; identical to SEQ ID NO: 247

SEQ ID NO: 258 - protein, 763 aa, Trichosanthes kirilowii
MWRLKVGGESVGEKEEKWVKSISNHLGRQVWEFCPHDGTPEQRLQVQKARDAFFRINRFRRKQSSDLFLAIQYEKEIANGATVGGIKLKEGDEVRKEAVKSTLERALNFYSAVQTTDGNWASDLGGPMFLLPGLVIALYVTGVLNSVLSKNHRQEMCRYLYNHQNEDGGWGLHIEGPSTMFGSALNYVALRLLGEDADGGDGGAMTKARAWILDRGGATAITSWGKLWLSVLGVYEWSGNNPLPPEFWLLPYFLPFHPGRMWCHCRMVYLPMSYLYGKRFVGPITPIVLSLRKELYTVPYHEVDWNKSRNTCAKEDLYYPHPKMQDILWGSIHHVYEPLFSRWPGKRLREKALQSAMQHIHYEDENTRYICLGPVNKVLNMLCCWVEDPYSDAFKLHLQRVHDYLWVSEDGMKMQGYNGSQLWDTAFSIQAIASTKLVDSYGPTLRKAHDFVKNSQIQQDCPGDSNVWFRHIHKGAWPFSTRDHGWLISDCTAEGLKASLMLSKLPSEIVGPSLEKNRLCDAVNVLLSLQNDNGGFASYELTRSYPWLELINPAETFGDIVIDYSYVECTSATMEALTLFKKLHPGHRTKEIDTAIGKAANFLEKMQRTDGSWYGCWGVCFTYAGWFGIKGLVAAGRTYNSCIAIRKACDFLLSKELPGGGWGESYLSCQNKVYTNLEGNRPHLVNTAWVLMALIEAGQAERDPAPLHRAARLLINSQLENGDFPQEEIMGVFNKNCMITYAAYRNIFPIWALGEYCHRVLTE

SEQ ID NO: 259 - protein, 775 aa, Trichosanthes kirilowii
MGRRERWGGRREIMWRLKVGGESVGEKEEKWVKSISNHLGRQVWEFCPHDGTPEQRLQVQKARDAFRINRFRRKQSSDLFLAIQYEKEIANGATVGGIKLKEGDEVRKEAVKSTLERALNFYSAVQTTDGNWASDLGGPMFLLPGLVIALYVTGVLNSVLSKNHRQEMCRYLYNHQNEDGGWGLHIEGPSTMFGSALNYVALRLLGEDADGGDGGAMTKARAWILDRGGATAITSWGKLWLSVLGVYEWSGNNPLPPEFWLLPYFLPFHPGRMWCHCRMVYLPMSYLYGKRFVGPITPIVLSLRKELYTVPYHEVDWNKSRNTCAKEDLYYPHPKMQDILWGSIHHVYEPLFSRWPGKRLREKALQSAMQHIHYEDENTRYICLGPVNKVLNMLCCWVEDPYSDAFKLHLQRVHDYLWVSEDGMKMQGYNGSQLWDTAFSIQAIASTKLVDSYGPTLRKAHDFVKNSQIQQDCPGDSNVWFRHIHKGAWPFSTRDHGWLISDCTAEGLKASLMLSKLPSEIVGPSLEKNRLCDAVNVLLSLQNDNGGFASYELTRSYPWLELINPAETFGDIVIDYSYVECTSATMEALTLFKKLHPGHRTKEIDTAIGKAANFLEKMQRTDGSWYGCWGVCFTYAGWFGIKGLVAAGRTYNSCIAIRKACDFLLSKELPGGGWGESYLSCQNKVYTNLEGNRPHLVNTAWVLMALIEAGQAERDPAPLHRAARLLINSQLENGDFPQEEIMGVFNKNCMITYAAYRNIFPIWALGEYCHRVLTE

SEQ ID NO: 260 - protein, 757 aa, Solanum tuberosum
MWKLKVAEGGSPWLRTLNGHIGRQVWEFDPNLGSPKDLEEIEKFRAEFYKNRFETKHSSDLLMRYQFSKENPVGTILPRVQVKDIGDITEDNVATTLRRAISFYSTLQAHDGHWAADCGGPMFLLPGLVIALSVTGALNAVLSEEHKREICRYLYNHQNCDGGWGLHIESHSTMFGSVLSYVTLRLLGEKANGGEGAMEKGRKWILDHGTATAITSWGKMWLSVLGLFDWSGNNPLPPEMWLLPYILPFHPGRMWCHCRMVYLPMSYLYGKRFVGPITPTVLSLRKELFTVPYHKINWNKARNECAKEDLYYPHPLLQDILWTSLDKLIEPLFMHWPGKKLREKALSTVMDHIHYEDENTRYICLGPVNKVLNMLCCWVEDSSSEAFKLHLPRLYDYLWIAEDGMKIQGYNGSQSWDTSFAIQAIISTNLVEEYGPTLRKAHKFMKNSQVLDDCPGNLDFWYRHISKGAWPFSTADHGWPISDCTAEGLKACLLLSKLPVEIVGEPLKANRLYDAVNVMLSLQNPDGGIGTYELSRSYPWLEIINPAETFGDIVIDYPYVECTSAIIQALAAFKKLYPGYRKEDVERCIEKGAAFIEKIQEADGSWYGCWGVCFTYGTWFGVKGLLDAGRNFNNSYNIRKACDFLLSKQVVSGGWGESYLSCQNKVYTNLKGNKSHSVCTAWAMLALIEAGQGERDPTPLHRAAKVLINSQLENGDFPQQEISGVFNKNCMISYSAYRNIFPIWALGQYQSQLLNPQ

SEQ ID NO: 261 - protein, 768 aa, Zea mays
MWKLKVAAEGGGGPLLRSTNRFVGRTVWEFEPDLGTPEQRAEVEKARRDFSDHRFQRRHSADVLMRMQMQQYSKGTPLKLDLPAVKKLGEDEDVTEEAVSTSLKRAINRVSALQAHDGHWPGDCSGPLFLLPGLIITLYVTGALNAVLSSEHQREIRRYLYNHQNEDGGWGLHMEGHSAMLGTTLNYVALRLIGEGPDSGGDDGAAMERGRNWILQRGGATYTTSWGKFWLTVLGVYDWSGNNPLPPEMWLLPYHLPFHPGRMWCHCRAVYLPMSYVYGKRFVGRITPLVLELRNELYGDPYSLIDWNKARNQCAKEDLYYPHSFLQDVLWATLHKFVEPVMMHWPGIKFREIALRTAMRHIHYEDESTRYINLGPVNKVLNMLACWIEDPNSEAFKLHVPRIYDYLWLAEDGMKMKGYNGSQLWDAGLTVLAIVNTDLIEEFGPTLKLAHAFVKNSQIIDNCLEDLNQWYRHMSKGGWPFSTADHGWCVSDCTATGLEATLLLSTISPQIVGEAMEVGRVYDGVNCLISLMNNNGGFATFELTRSYAWLEHINPSETFGGIMIDYPYVECTSSSIQALALFKKLYPRHRTEEIDSCISKGANFIESMQRNDGSWYGSWGVCFTYATWFAVFGLACAGRTFEDSPAIKKACEFLLSKELPSGGWGESYLSCQDKVYTNLEGMRPHAVNTSWAMLALIRVGQAERDPAPLHRAARVLINLQSEDGEFPQQEIIGVFNQNCMIGYSQYRNIFPIWALGEYRTKVHVPRKK

SEQ ID NO: 262 - protein, 757 aa, Tarenaya hassleriana
MWRLKFAEGGSPWLRTTNNHVGRQVWEFDPRLGTPEELAEIEEARKSFAENRFVHKHSSDLLMRLQFSRENPVRQVLPQVEVKDTDDISKEAVKSTLERALSFYSAVQTSDGNWASDLGGPMFLLPGLVIALSITGALNAVLSEQHKQEMCRYLYNHQNEDGGWGLHIEGPSTMFGSVLNYVTMRLLGEGPNDGDGAMEKGRDWILNHGGATYITSWGKMWLTVLGVFEWSGNNPLPPEIWLLPYILPIHPGRMWCHCRMVYLPMSYLYGKRFVGPITPTVLSLRKELFTVPYHEVDWNKARNLCAKEDLYYPHPVVQDILWASLHKVVEPILMRWPVTKLREKALRTAIEHIHYEDENTRYICLGPVNKVLNLLCCWVEDPYSDAFKLHLQRVHDYLWVAEDGMKMQGYNGSQLWDTAFSIQAIFATNFVEEYGDVLKKANSYIKDSQIQEDCPGDPNVWFRHIHKGAWPFSTRDHGWLISDCTAEGLKASLMLSKLPSTMVGEPLEANRLCDAVNVLLSLQNDNGGFASYELTRSYPWLELINPAETFGDIVIDYPYVECTSATMEALTLFKKLHPGHRTKEIDQCIKKAAKFLEKMQRADGSWYGCWGVCFTYAGWFGIKGLVAAGRTYNSCLAIRKACEFLLSKELPGGGWGESYLSCQNKVYTNLEGNKPHLVNTAWVLMALIEAGQHERDPKPLHRAARYLINSQLENGDFPQQEIMGVFNKNCMITYAAYRNIFPIWALGEYRSQVLQAA

SEQ ID NO: 263 - protein, 663 aa, Gossypium hirsutum
MDRQSFRDNRFHRKQSSDLFLAIQFAEEKQSVTNLPQTKLEEFEDVKKEAVKSTLERALSFYSAVQTSDGNWASDLGGPMFLLPGLVITLYVTGALNTVLSKEHQYEICRYLYNHQNRDGGWGLHIEGPSTMFGTVLNYVSLRLLGEGAEGGEGAIEKARRMWCHCRMVYLPMSFLYGKKFVGPITPTILSLRKELYTVPYHEVDWNKARNACAKEDLYYPHPLVQDILWASLHYLYEPMLKYWPCKSLREKALQIVMQHIHYEDENTRYICLGPVNKVLNMLCCWVEDPYSESFKLHLPRILDYLWIAEDGMKMQGYNGSQLWDTAFAIQAIISTGLADEYGSVLRKAHDFLKDSQIQEDCPGDPNVWFRHIHKGAWPFSTRDHGWLISDCTAEGLKASLMLSKLPSTMVGEPLEVNRLCDAVNVLLSLQNDNGGFASYELTRSYPWLELINPAETFGDIVIDYPYVECTSATMEALTLFKKLHPGHRTKEIDIGRAVEFLEKMQRADGSWYGCWGVCFTYAGWFGIKGLVAAGRTYNSCLAIRKACEFLLSKELPGGGWGESYLSCQNKVYTNLEGNKPHLVNTAWVLMALIEAGQAERDPTPLHRAAKILINSQMEDGDFPQEEIMGVFNKNCMISYSAYRNIFPIWALGEYHCRVLQAP

SEQ ID NO: 264 - DNA, 1563 bp, Artificial Sequence
  Synthetic
atggaaatgtcctcaagtgtcgcagccacaatcagtatctggatggtcgtcgtatgtatcgtaggtgtaggttggagagtcgtaaattgggtttggttgctgccaaagaaattggaaaagagattgagagaacaaggtttggccggtaattcttacagattgttgttcggtgacttgaaggaaagagctgcaatggaagaacaagcaaattcaaagcctataaacttctcccatgacatcggtccaagagttttcccttcaatgtacaagaccatccaaaactacggtaaaaactcctacatgtggttaggtccataccctagagtccacatcatggatccacaacaattgaagaccgtttttactttggtctacgacattcaaaagccaaatttgaaccctttgattaaattcttgttagatggtatcgttacacatgaaggtgaaaagtgggctaagcacagaaagattattaacccagcattccatttggaaaagttgaaggatatgatacctgctttctttcactcatgtaatgaaatcgtcaacgaatgggaaagattgatttcaaaagaaggttcctgcgaattggatgtaatgccttatttgcaaaatttggccgctgacgccatttcaagaaccgcttttggttcttcatacgaagaaggtaaaatgatcttccaattgttgaaggaattgactgatttggttgtcaaggtagcttttggtgtttatattccaggttggagattcttgcctacaaagagtaacaacaaaatgaaggaaattaatagaaaaatcaagtctttgttgttgggtatcattaacaagagacaaaaggcaatggaagaaggtgaagccggtcaatctgatttgttgggtatattaatggaaagtaattctaacgaaatccaaggtgaaggtaataacaaggaagatggcatgtctattgaagacgtcatcgaagagtgtaaggtattttatataggtggtcaagaaactacagcaagattattgatctggactatgatattgttgtccagtcatacagaatggcaagaaagagccagaaccgaagtcttgaaggtatttggtaataagaaaccagatttcgacggtttgtcaagattgaaggtagttactatgatcttgaacgaagttttaagattgtacccacctgcttccatgttgacaagaatcatccaaaaggaaacaagagttggtaaattaaccttgccagcaggtgttatcttgataatgcctatcatcttgatacatagagatcacgacttgtggggtgaagatgctaacgagtttaaaccagaaagattcagtaaaggtgtttctaaggcagccaaagtccaaccagcctttttcccttttggttggggtcctagaatttgcatgggtcaaaacttcgctatgatcgaagctaagatggcattgagtttgatcttgcaaagattttctttcgaattgtcttcatcctacgttcatgcaccaactgtcgtcttcactacacaaccacaacacggtgcccacatcgttttgagaaagttataa

SEQ ID NO: 265 - DNA, 1422 bp, Artificial Sequence
  Synthetic
atgtggactgtcgtgctcggtttggcgacgctgtttgtcgcctactacatccattggattaacaaatggagagattccaagttcaacggagttctgccgccgggcaccatgggtttgccgctcatcggagagacgattcaactgagtcgacccagtgactccctcgacgttcaccctttcatccagaaaaaagttgaaagatacgggccgatcttcaaaacatgtctggccggaaggccggtggtggtgtcggcggacgcagagttcaacaactacataatgctgcaggaaggaagagcagtggaaatgtggtatttggatacgctctccaaatttttcggcctcgacaccgagtggctcaaagctctgggcctcatccacaagtacatcagaagcattactctcaatcacttcggcgccgaggccctgcgggagagatttcttccttttattgaagcatcctccatggaagcccttcactcctggtctactcaacctagcgtcgaagtcaaaaatgcctccgctctcatggtttttaggacctcggtgaataagatgttcggtgaggatgcgaagaagctatcgggaaatatccctgggaagttcacgaagcttctaggaggatttctcagtttaccactgaattttcccggcaccacctaccacaaatgcttgaaggatatgaaggaaatccagaagaagctaagagaggttgtagacgatagattggctaatgtgggccctgatgtggaagatttcttggggcaagcccttaaagataaggaatcagagaagttcatttcagaggagttcatcatccaactgttgttttctatcagttttgctagctttgagtccatctccaccactcttactttgattctcaagctccttgatgaacacccagaagtagtgaaagagttggaagctgaacacgaggcgattcgaaaagctagagcagatccagatggaccaattacttgggaagaatacaaatccatgacttttacattacaagtcatcaatgaaaccctaaggttggggagtgtcacacctgccttgttgaggaaaacagttaaagatcttcaagtaaaaggatacataatcccggaaggatggacaataatgcttgtcaccgcttcacgtcacagagacccaaaagtctataaggaccctcatatcttcaatccatggcgttggaaggacttggactcaattaccatccaaaagaacttcatgccttttgggggaggcttaaggcattgtgctggtgctgagtactctaaagtctacttgtgcaccttcttgcacatcctctgtaccaaataccgatggaccaaacttgggggaggaaggattgcaagagctcatatattgagttttgaagatgggttacatgtgaagttcacacccaaggaatga

SEQ ID NO: 266 - DNA, 2106 bp, Artificial Sequence
  Synthetic
atgaaggtgtcgccttttgagttcatgagtgccataattaaaggcagaatggacccgagcaattcatcttttgaatccacaggagaagtagcatctgtcatctttgagaaccgagaattggttgcgattttaaccacgtcaatagctgttatgattgggtgtttcgtggttcttatgtggcgtagggctggttccagaaaagtcaagaatgtcgaactacccaaaccactgatcgttcacgaaccagagcctgaagtagaagatggtaagaaaaaggtaagcatcttctttggtactcagacaggaactgccgagggcttcgcaaaagctttggcagatgaagctaaggcgcgctatgaaaaagccacttttagagttgtcgacctcgatgattacgcggctgacgatgaccaatatgaagagaaattaaaaaacgagtctttcgcagtatttctattggcaacatacggtgatggtgaaccaaccgataatgctgcaaggttctataagtggtttgccgaagggaaagagcgtggcgaatggttacaaaacttacattacgctgtttttggattgggtaatcggcagtatgaacattttaataaaattgcaaaggtggccgatgagcttttagaagctcaaggtgggaacagactcgtaaaagttggcctgggggatgacgatcaatgcatagaagacgatttctcagcttggagagaaagtttgtggcccgaacttgacatgctcttaagagatgaagatgatgctacaactgttacgaccccttacactgctgccgtcttggagtatcgagtggtgttccacgatagcgcagatgtcgctgcggaggacaagtcttggattaatgccaacggtcatgctgttcacgacgctcaacatcctttccgctctaatgtagttgtgagaaaagaactgcatacatccgcctctgatagaagttgttcgcatttagaatttaacatatcaggctctgcactaaattatgagactggagatcatgtaggtgtttactgcgaaaaccttacagaaaccgtagatgaagcattgaatttgctaggtctttccccggaaacctatttttcaatctatactgataacgaggacggaacaccactaggaggttcctcactaccccctccatttcccagctgtacgctaaggacggcattaacaaggtacgcggacttgttgaatagtccaaagaagagtgcacttctggctttagccgctcacgcatccaatccagttgaagcggatcgtttaagatacctcgcttccccagcagggaaagatgaatatgcccaatctgtgattggtagccagaaaagtttactcgaggtcatggcagagtttccctcagcgaagcctcctttgggcgttttctttgctgcggttgcacctcgactccaaccgcgtttctacagtatttcctctagtccacggatggcaccatctcgtatccatgttacttgtgcgttggtgtacgataagatgccgactggccgcatacacaaaggtgtctgctcaacttggatgaagaatagtgtaccaatggaaaaatctcatgagtgttcgtgggcaccaatattcgttaggcaatcaaattttaagcttccagctgaatccaaagtcccaattatcatggttggccctgggaccggtctagcaccttttagaggatttctacaagaaagactagccttaaaggaatctggtgtggaattgggcccgtctattcttttcttcggatgcagaaacagaagaatggattatatttatgaagatgagttaaacaattttgttgaaacaggggctctttcagaattagtaattgccttttcaagggaaggtcctaccaaagaatacgttcagcataaaatggccgagaaagcttcagacatctggaatttgatcagtgaaggtgcttatttgtacgtatgtggcgatgctaaaggtatggctaaggatgtgcataggacgcttcacactataatgcaagaacagggtagtttagacagttcgaaggccgaatctatggtgaagaacttgcaaatgaatggtagatatttgcgtgatgtgtggtaa

SEQ ID NO: 267 - DNA, 2079 bp, Artificial Sequence
  Synthetic
atgacctctgcattgtatgcttctgatcttttcaaacaattaaagagtataatgggtactgactccttgtctgatgatgtagttttggtaatagctactacatctttagctctagtcgctggttttgtggtcttgctttggaagaagactactgctgatagatccggtgaattgaaacctctgatgattcctaaatctttgatggctaaagatgaagacgatgatttggacctgggctctggtaagacaagagtttctattttttttggtactcaaactggtactgccgagggttttgctaaggctttgtctgaggaaattaaagctagatatgaaaaggccgcagttaaggtgattgatttggatgactatgctgctgatgatgatcaatacgaagaaaaattgaagaaagaaactttggcattcttctgtgtggctacttacggtgatggtgaaccaactgacaacgctgctagattttataaatggttcactgaggaaaatgaaagagatattaagttacaacaattggcttatggtgtttttgccctaggaaatagacaatacgagcattttaataaaatcggtatcgttttggacgaggaactatgtaagaaaggtgctaaaagattaattgaagttggtttaggtgatgacgatcaatcaattgaagatgactttaacgcttggaaagagtctttgtggtctgagttggataaactgttgaaggatgaagatgacaaatcagtagcaacaccatatactgctgttataccagaatatagagttgttactcatgatccaagatttactactcagaaatctatggagtctaatgttgctaacggtaatactactattgatattcatcatccatgcagagtagacgttgccgttcaaaaagaattgcatacccatgagtccgatagatcttgtatccatcttgagttcgatatttctaggactggtattacctatgaaactggtgaccatgtgggtgtttatgcagaaaatcatgtcgaaatagttgaagaagctggtaagttgttgggtcattccttggacctggtcttttctatccatgctgacaaagaagatggaagtccattggaatctgctgtccctccaccatttccaggaccatgcactttgggtactggtttggctagatatgcagacttgttgaatccaccaagaaaatcagcattggttgctctggctgcttatgcaaccgagcctagtgaagctgaaaaattgaagcatcttacttctccagatggtaaagatgaatactctcaatggattgttgcttctcaaagaagtttattagaagtaatggcagcatttccatctgctaaaccaccattaggtgttttctttgctgctatcgctccaagattacagccaagatattattcaatatcttcttcaccaagattggctccatctagggttcatgtcacttctgctctagtttacggtccaacaccaactggtagaatccataagggtgtttgttccacttggatgaagaatgctgttccagcagagaaatctcatgaatgctctggtgctccaatttttataagagcttctaactttaaattaccatctaatccatctactccaatagtaatggtaggaccaggtactggtttagcaccatttagaggtttccttcaagaaagaatggctttaaaagaggacggtgaagaactgggttcttctctgttattctttggttgtagaaatagacaaatggactttatttacgaagatgaattgaataattttgttgatcagggagtaatttccgagttgataatggctttttctagggaaggtgctcaaaaagagtacgtccaacataaaatgatggaaaaagctgctcaggtatgggatttaattaaagaagaaggttatttgtatgtatgcggtgacgctaaaggtatggcaagagatgtacatagaactttgcatactatagtgcaagaacaagaaggtgtgtcttctagtgaagctgaggccattgttaagaaactacaaactgaaggtagatatctgagagatgtatggtaa

SEQ ID NO: 268 - DNA, 951 bp, Artificial Sequence
  Synthetic
atggatgaaatcgaacatattaccatcaatacaaatggaatcaaaatgcatattgcgtcagtcggcacaggaccagttgttctcttgctacacggctttccagaattatggtactcttggagacaccaactactttacctgtcctccgttgggtacagagcaatagctccagatttgagaggctatggcgatactgacagtccagctagtcctacctcttatactgctcttcatattgtaggtgacctggtcggcgcattagacgaattgggaatagaaaaggtctttttagtgggtcatgactggggtgctattatcgcatggtacttttgtttgtttagaccagatagaattaaagcacttgtgaatttgtctgtccagtttatcccacgtaacccagcaataccttttatagaaggtttcagaacagcttttggtgatgacttctacatttgtagatttcaagtacctggggaagctgaagaggatttcgcgtctatcgatactgctcaattgtttaaaacttcattatgcaatagaagctcagcccctccttgtttgcctaaagagattggttttagggctatcccaccaccagaaaatctgccatcttggctcacagaggaagatatcaacttctacgcagccaagtttaaacaaactggttttactggtgcccttaactattatagagcattcgacttgacatgggaattaacagccccatggacaggagcccagatccaagttcctgtaaagttcatagttggtgattcagatctcacgtaccatttccctggtgctaaggaatacatccacaacggagggtttaaaagagatgtgccactattagaggaagttgttgtggtaaaagatgcctgccacttcattaaccaagagcgaccacaagagattaatgctcatattcatgacttcatcaataagttctaa

SEQ ID NO: 269 - DNA, 1016 bp, Artificial Sequence
  Synthetic
atgaaagtaagaatttttgaaaattcgaattcagacgcgattgaacatagaaccgtaagtgttaatggtatcaatatgcatgtggcagaaaagggagagggacctgtcgtgttgttgcttcatggtttcccagaattgtggtacagttggagacatcaaatattggctctttcctctttaggttacagagctgtcgcaccagacttacgaggctacggggatacagatgccccagggtcaatttcatcatacacatgctttcacatcgtaggagatctcgtggctctagttgagtctctgggtatggacagggtttttgttgtagcccacgattggggtgccatgatcgcttggtgtttgtgtctgtttagacctgaaatggttaaagcttttgtttgtctctccgtcccattcagacagagaaaccctaagatgaaaccagttcaaagtatgagagcctttttcggcgatgattactatatttgcagatttcaaaatcctggggaaatcgaagaggagatggctcaagtgggtgcaagggaagtcttaagaggaattctaacatctcgtcgtcctggaccaccaatcttaccaaaagggcaagcttttagagcaagaccaggagcatccactgcattgccatcttggctatctgaaaaagatctgtcatttttcgcttctaagtatgatcaaaagggctttacaggcccactaaactactacagagccatggatcttaattgggaattgactgcgtcatggactggtgtccaagttaaagtacctgtcaaatacatcgtgggtgacgttgacatggtttttacgactcctggtgtaaaggaatatgtcaacggcggtggtttcaaaaaggacgttccatttttacaggaagtggtaatcatggaaggcgttggtcatttcattaatcaggaaaaacctgaggagatttcatctcatatacacgatttcataagcaaattcgagctcttaattaacaattcttcgccagaggttaa

SEQ ID NO: 270 - DNA, 951 bp, Artificial Sequence
  Synthetic
atggaccagatcgaacacattacgataaataccaacggaattaagatgcatatagcgagtgtgggtacagggccagtcgttcttctactgcatggtttccctgagttgtggtactcctggagacatcaactcttatatttgtcttcggttggatatcgcgctattgcaccggatttaaggggctacggtgatactgactcacccgccagccctacttcttatacagctttacacatcgtaggcgatctggtaggtgcattggatgaactaggaatagaaaaagtttttctagtgggtcatgactggggcgccattattgcttggtatttttgccttttccgtccagatagaatcaaagcgttagttaatttgtccgtccaatttattccacgaaaccctgcaatccccttcattgaagggtttagaacagccttcggtgacgatttttacatgtgtagatttcaagtcccaggcgaggctgaagaggattttgcctctatagatactgctcagctgttcaagaccagtctttgtaataggtcatcggctcctccatgtttgcccaaagaaatcggtttccgggcaattccaccgcctgaaaacttaccaagctggttgaccgaggaagacattaactactatgcagcgaagtttaaacaaacgggtttcactggtgctctcaattattaccgtgcatttgatttaacatgggagttaacagccccctggactggtgctcagatacaagtgccggttaagttcatagtaggggattcagacttgacatatcattttccaggagccaaagaatatatacacaatggaggttttaaaaaagatgtacctcttttggaagaagtagttgtggtgaaggatgcatgccatttcatcaaccaagaaaggccacaagaaattaatgctcacatccatgactttatcaataaattctaa

SEQ ID NO: 271 - DNA, 951 bp, Artificial Sequence
  Synthetic
atggaaaagattgaacacaccactatttctaccaatggtatcaacatgcatgttgcctctattggttctggtccagctgtcttgttcttgcacggtttcccagaattgtggtattcttggagacaccaattattattcttgtcttccatgggttacagagctatcgctccagacttaagaggttttggtgacaccgacgctccaccatctccatcttcttacaccgctcaccacattgtcggtgacttggtcggtttgttagaccaattgggtattgaccaagtttttttggttggtcacgactggggtgctatgatggcctggtacttttgtttgttccgtccagatagagttaaggctttggtcaatttatctgtccacttcttacgtagacacccatctatcaaatttgttgatggtttcagagccttattaggtgatgatttttacttctgtcaattccaagaaccaggtgtcgctgaagccgacttcggttctgtcgatgttgctaccatgttgaagaaattcttgaccatgagagatccaagacctccaatgattcctaaggaaaagggtttcagagccttggaaactccagatccattgccagcctggttaactgaagaagacattgactacttcgccggtaagtttcgtaagaccggttttaccggtggttttaattactacagagccttcaacttgacttgggagttgaccgctccatggtctggttctgaaatcaaggtcgctgccaagttcattgttggtgatttagacttggtttatcacttccctggtgccaaggagtatatccatggtggtggtttcaaaaaggacgtccctttgttggaggaagttgttgttgttgatggtgctgctcacttcatcaaccaagaaagaccagctgaaatttcttccttgatttacgactttatcaagaagttctaa

SEQ ID NO: 272 - DNA, 945 bp, Artificial Sequence
  Synthetic
atggagaagattgaacactctactatcgctactaatggtatcaatatgcacgttgcctctgctggttctggtccagctgttttgtttttgcacggtttcccagaattatggtattcctggagacaccaattgttgtacttgtcttctttgggttacagagctattgctccagatttgagaggtttcggtgacaccgatgctccaccatctccatcctcctacaccgcccaccacatcgttggtgatttggtcggtttgttggatcaattaggtgtcgatcaagtctttttggttggtcatgattggggtgctatgatggcctggtacttctgtttgttccgtccagacagagtcaaggccttagttaatttatctgtccacttcaccccacgtaacccagctatctctccattagatggtttccgtttgatgttgggtgatgatttctacgtttgtaagtttcaagaaccaggtgtcgctgaagccgatttcggttctgttgatactgccactatgtttaaaaagttcttgaccatgagagatccacgtccacctattattccaaacggtttcagatccttggccaccccagaagctttgccatcctggttgactgaagaggatatcgattactttgctgccaaattcgctaagactggttttactggtggtttcaactactacagagctatcgacttgacctgggagttgactgctccatggtccggttctgaaatcaaggttccaactaagtttattgttggtgacttagacttggtttaccatttcccaggtgttaaggaatacattcacggtggtggtttcaagaaggacgttccattcttggaagaagttgtcgtcatggaaggtgctgctcattttatcaaccaagaaaaagctgacgaaattaattctttgatctatgacttcattaaacaattctag

SEQ ID NO: 273 - DNA, 951 bp, Artificial Sequence
  Synthetic
atggaaaacatcgaacacaccactgtccaaactaacggtatcaagatgcacgtcgctgctattggtactggtccaccagttttgttgttgcatggtttcccagaattgtggtattcttggagacaccaattgttgtacttgtcttctgctggttacagagctatcgctccagacttgagaggttacggtgataccgacgctccaccttccccatcttcctataccgctttacacattgtcggtgatttggtcggtttgttggacgtcttgggtatcgaaaaagtcttcttaatcggtcacgactggggtgccatcatcgcctggtacttctgtttattcagacctgatagaatcaaagctttggttaacttgtctgttcaattcttcccaagaaacccaaccaccccatttgttaagggtttcagagccgtcttgggtgatcaattttacatggttagattccaagaaccaggtaaagctgaagaagaattcgcttccgttgatattagagaattcttcaagaatgttttgtccaacagagatccacaagctccatatttgccaaatgaagttaagttcgaaggtgtcccaccaccagctttggctccatggttgaccccagaagatatcgatgtctacgctgacaaattcgctgaaactggtttcactggtggtttgaactactacagagcctttgacagaacctgggaattaactgctccatggaccggtgcccgtattggtgtcccagtcaagttcattgtcggtgatttggacttgacttaccactttccaggtgctcaaaaatacattcacggtgaaggtttcaagaaggctgtcccaggtttggaagaagttgtcgttatggaggatacctctcacttcattaaccaagaaagaccacacgaaattaattctcacatccacgatttcttctctaagttctgttaa

SEQ ID NO: 274 - DNA, 951 bp, Artificial Sequence
  Synthetic
atggatcaaattgaacacatcactattaacaccaacggtatcaaaatgcatatcgcctctgttggtactggtcctgttgttttgttgttgcatggtttcccagaattgtggtactcttggcgtcatcaattgttgtatttgtcctctgtcggttacagagctattgctccagatttaagaggttacggtgatactgactctccagcctctccaacttcttataccgctttgcatatcgttggtgacttggtcggtgctttggatgaattgggtattgaaaaggtcttcttggtcggtcatgattgggctgccatcatcgcttggtacttttgtttgtttagaccagatcgtattaaagctttagttaatttgtctgttcaattcatcccaagaaacccagctatcccatttattgaaggtttcagaaccgcttttggtgatgatttctacatgtgtagattccaagttccaggtgaagctgaagaagactttgcttctattgatactgctcaattgttcaaaacctccttgtgtaacagatcctccgctccaccatgcttgccaaaagaaatcggtttcagagctattccaccaccagaaaatttgccatcttggttgaccgaggaagacattaattactacgctgctaagttcaagcaaaccggtttcactggtgctttaaactactatagagctttcgatttgacctgggaattaactgctccatggaccggtgctcaaattcaagtcccagtcaagttcattgttggtgattctgacttgacttaccattttccaggtgctaaggaatacatccacaacggtggtttcaagaaggacgttccattgttggaagaagttgttgttgtcaaggacgcttgtcacttcatcaaccaagaaagaccacaagaaattaacgctcacattcatgactttattaacaagttctaa

SEQ ID NO: 275 - DNA, 942 bp, Artificial Sequence
  Synthetic
atggagaagatcgaacactcaacgattgccaccaacggaataaatatgcatgtggcgagcgcaggtagtgggccagctgttcttttcctgcatggttttcctgaattgtggtactcttggagacatcaactattatatctctcctcgttaggatatcgcgctattgcaccggatttgaggggctttggtgacacagatgcccccccatctccttcatcttacactgctcaccacatagtaggcgacctggtcggtttgttagatcagctaggagtagatcaagttttcctagtcggtgactggggagcgatgatggcttggtatttttgcttatttagacctgatcgggttaaagctcttgtgaatttgagtgtgcatttcacaccacgtaacccagcaatttcccctttggatggctttcgacttatgttaggggatgacttctacgtatgtaaattccaagagccaggtgttgccgaagcagattttggttcggttgacactgctaccatgttcaagaaatttttgacgatgagagatccgaggcccccaatcattcccaatggttttagaagtcttgcgacacccgaagcactcccttcttggttaactgaagaggatatagactattttgccgcaaagttcgctaagaccggtttcacgggcgggtttaattactatagagccattgatctaacatgggaattaactgccccttggtcaggaagcgaaatcaaagtcccgactaaatttatagtaggggacctggatctcgtttatcatttcccaggtgtcaaagaatatattcatggaggaggttttaaaaaggacgttccatttttggaggaagttgtcgtaatggaaggtgctgctcactttataaaccaggagaaggcagatgagatcaactcattgatctacgattttattaaacaattctaa

SEQ ID NO: 276 - DNA, 951 bp, Artificial Sequence
  Synthetic
atggagaagatcgaacacaccacgatttcaacaaacggaataaatatgcatgtggcgagcattggtagtgggccagccgttcttttcctgcatggttttcctgaattgtggtactcttggagacatcaactattatttctctcctcgatgggatatcgcgctatcgcaccggatttgaggggcttcggtgacactgatgctcccccatctccttcatcttatacagcacaccacatagtaggcgacctagtcggtttattagatcagctgggaattgatcaagttttcctcgtaggtcatgactggggcgccatgatggcttggtacttttgcttgtttcgtccagatagagttaaagcgttagttaatttgtccgtccatttcttacggcgacatcctagtattaaatttgtcgatgggtttagagcactactaggtgacgatttttatttctgtcaatttcaggaaccaggcgtggctgaagccgactttggttctgtggatgttgctactatgttgaagaaattccttaccatgagagatccacgtccccccatgatacctaaggagaaaggcttcagggcattagaaactcctgatccactcccagcctggttgacagaggaagatatagactatttcgcgggaaagtttagaaaaactggatttaccggtggtttcaactactatagagcttttaatcttacgtgggaacttacagcaccgtggtctggttcggaaatcaaggtagctgcaaaatttattgtgggagatcttgatctcgtttaccacttcccgggcgccaaagaatacattcatggaggtggctttaaaaaagacgttcccttattggaagaggtcgtagtggtcgatggggccgctcacttcataaaccaagagaggcctgctgagatttcttcacttatctatgacttcatcaagaagttttaa

SEQ ID NO: 277 - DNA, 1587 bp, Artificial Sequence
  Synthetic
atggtggaccaatgtgcacttgggtggatcctagcgtcagctctgggcttagtaatagccctctgcttctttgtcgctcctcgaagaaaccaccgcggagttgattcgaaagagagagatgaatgtgttcagtctgcggcaaccactaagggtgaatgtaggtttaatgaccgtgatgtagatgttattgtcgtgggtgctggtgttgccggatccgcattggcacatacgttgggcaaagacggtagaagggtgcatgtaattgaaagagacctcacagaaccagatcggatagttggggagttacttcaaccgggtggttacttaaagctaatcgagttaggattgcaagattgcgtggaagaaattgatgctcagagagtatatggctatgccttgttcaaagatggaaaaaatacacgtttgagctacccattagagaactttcacagtgacgtttctggtcgatcattccataatggtagatttattcaacgtatgagagaaaaggctgcgtccctacccaacgtcaggctggaacaaggaactgttacctcgctcttggaggaaaaaggcactatcaagggtgtccaatataaatcaaagaatggggaagaaaaaacagcatacgctccgctcactatagtgtgtgacggttgtttctctaacttacgccgaagtctgtgcaatcctatggtcgatgttccaagctattttgtaggcttggtgttggaaaattgcgagctgccattcgctaaccacggacatgtaattttaggcgatccttctcccattcttttttaccagatttccaggaccgaaataagatgtttggttgatgtccctggtcaaaaagttccatcaatagcaaatggcgagatggaaaagtatctgaaaacagtggtagctcctcaggttcctccacaaatctatgatagttttattgcggccatagacaagggtaacatcaggacgatgcccaatagatctatgccagctgccccacatcctacgccgggtgcccttctaatgggggatgcatttaacatgagacatcccctgacaggaggtggtatgaccgtggcattgagcgatattgtagttttacgtaatcttttaaaacctctcaaggacctgtcagatgcaagtactctgtgcaagtatttagaaagtttctacacccttagaaaaccagttgcttcaactattaacacgttggccggggctctatataaagtattttgtgcctctccggaccaggctaggaaagaaatgcgtcaagcttgtttcgattatttatccttgggaggcatattttcaaatggccctgtatcgctattaagcggactaaacccaagaccactatctctagtcctccacttctttgctgtggcaatatacggtgttggtcgcttgctacttccatttccttctgtcaaggggatctggattggagcgcgtttaatctatagcgcgagtggtattatttttcccattataagagctgagggtgttagacagatgtttttccctgcaacagttcctgcctactataggtccccacccgtgttcaaacccatagtttaa

SEQ ID NO: 278 - DNA, 1575 bp, Artificial Sequence
  Synthetic
atggtggaccaatgtgcacttgggtggatcctagcgtcagttctgggcgctgccgcactctactttttgttcggacgaaaaaatggtggtgtatcgaacgaaaggcgccatgagtccataaagaatattgctactaccaacggtgaatataaaagctctaattccgatggggatattataatcgtcggcgcaggagttgctggtagtgccttagcttatacgttgggtaaggacggaagaagagtgcacgtcattgagcgtgatttgacagaaccggatagaatcgtgggggaattattgcagcccggcggttacttaaaactaactgagttaggtcttgaagactgcgttgatgatattgacgcacaaagggtatatggttacgctttatttaaggatggtaaagatacacggctatcttatccattagaaaagttccattcagacgtagccggaaggtcttttcacaacggcagattcatccaaagaatgcgggaaaaagcggctagtttgccaaaagtttcacttgagcagggtaccgtaacttcgctgcttgaagaaaatggcattataaagggcgtccaatacaaaacaaaaacaggtcaagaaatgaccgcctatgcacctctcactattgtttgtgacggatgcttttctaacctgcgtagatccttgtgtaatcctaaggttgatgtaccatcatgctttgtgggcttagttcttgagaactgtgatctaccctacgctaatcatgggcatgtgatactggctgaccctagtccaatattgttctatcgaatttcttcaacggagatcagatgtttagtcgacgttcccggacaaaaagttccttcgatctctaatggtgaaatggcgaattacctgaagaacgtagtcgccccacagataccaagtcagttgtatgatagctttgttgcagcaattgataaaggaaatattaggactatgccgaaccgtagcatgccggccgatccttatcccactccgggtgctttattgatgggtgacgcgtttaatatgagacacccattgacaggcggaggtatgaccgtcgcgctgagtgatgttgtcgtgctaagagacctattaaaaccattacgcgatttaaacgatgctcctacactgtcaaagtaccttgaagcattctacacgctacgaaaaccagtagccagtaccatcaacacattggctggtgcattgtataaggtgttttgcgcatctccagatcaagcacgtaaagaaatgagacaggcatgtttcgattatttgtctcttggtggtattttttccaatggacctgtatcactactctcagggttgaatccaaggccaattagcctagtactacatttctttgccgttgccatctacggcgtaggtcgtctattaataccgtttccttctcctaagagagtctggatcggcgctagaattataagcggcgcttcggcaattatcttccctataataaaggctgaaggagttagacaaatgttctttccggctactgtggcggcttattatcgtgcaccaagagttgtcaagggtaggtaa

SEQ ID NO: 279 - DNA, 1536 bp, Artificial Sequence
  Synthetic
atggacggggtaattgatatgcagaccatacccctacgtacggccatcgcaattggaggcactgcggttgctcttgtcgtggctttgtacttctggtttctccgtagctatgcatctccttcccaccattcaaatcatttaccgcctgttccagaagtaccaggtgtgccagttttaggtaacctgttgcaattgaaagagaagaaaccctatatgacatttactaagtgggccgaaatgtacggtcctatctattcgattcgcacaggagctacatcaatggtcgttgtaagtagtaatgagatagcgaaagaagtggttgtgactaggttcccatctatctcaactagaaaactgtcctatgccttgaaggtcttaaccgaagataaatctatggtcgcaatgagcgattaccatgactaccacaaaacagttaagcgacatattttaacggctgttctaggcccaaacgcacaaaagaaatttagagctcacagagataccatgatggagaatgtaagcaacgaattgcatgctttctttgaaaagaatcctaatcaggaagtcaaccttagaaaaatatttcaatcccaacttttcggtttagctatgaaacaggcattagggaaggatgtggaatctatttatgtaaaggacctggaaactaccatgaaaagggaagagatattcgaagttcttgttgttgaccccatgatgggagccattgaagtcgattggcgagattttttcccgtatctcaaatgggtgccaaataaatcttttgaaaatataatccataggatgtacacgagaagagaggccgttatgaaagcgttgattcaagagcacaagaaaaggatcgcttcaggtgagaacctaaattcctacatagattatctcttgagtgaagctcaaacattaactgacaaacagttattaatgtcgttgtgggaacctattatagaatcgtctgatactaccatggtaacaacagaatgggcaatgtatgaacttgcgaagaaccctaatatgcaagatcgtctgtacgaagagattcaatcggtttgtggaagcgagaagattacagaagaaaacttatcacaactcccatatctatatgccgttttccaggaaactctgagaaagcattgccctgtgccgatcatgccacttagatacgtacatgagaacactgttttgggtggttaccacgtaccagcaggcaccgaagtggcaatcaatatttatggctgtaatatggacaagaaagtgtgggaaaatcccgaagagtggaatccagaacgttttctgtctgaaaaagagagtatggatttgtataaaacgatggcatttggtggaggtaaaagagtttgtgcgggatctctacaagctatggtaattagttgcatcggcatcgggaggttagttcaagattttgaatggaaactaaaagatgacgctgaagaagatgtgaatacattaggtttgactacgcaaaagctacaccctttgttagcactaattaacccgcggaaa

SEQ ID NO: 280 - protein, 520 aa, Siraitia grosvenorii
MEMSSSVAATISIWMVVVCIVGVGWRVVNWVWLRPKKLEKRLREQGLAGNSYRLLFGDLKERAAMEEQANSKPINFSHDIGPRVFPSMYKTIQNYGKNSYMWLGPYPRVHIMDPQQLKTVFTLVYDIQKPNLNPLIKFLLDGIVTHEGEKWAKHRKIINPAFHLEKLKDMIPAFFHSCNEIVNEWERLISKEGSCELDVMPYLQNLAADAISRTAFGSSYEEGKMIFQLLKELTDLVVKVAFGVYIPGWRFLPTKSNNKMKEINRKIKSLLLGIINKRQKAMEEGEAGQSDLLGILMESNSNEIQGEGNNKEDGMSIEDVIEECKVFYIGGQETTARLLIWTMILLSSHTEWQERARTEVLKVFGNKKPDFDGLSRLKVVTMILNEVLRLYPPASMLTRIIQKETRVGKLTLPAGVILIMPIILIHRDHDLWGEDANEFKPERFSKGVSKAAKVQPAFFPFGWGPRICMGQNFAMIEAKMALSLILQRFSFELSSSYVHAPTVVFTTQPQHGAHIVLRKL

SEQ ID NO: 281 - protein, 473 aa, Siraitia grosvenorii
MWTVVLGLATLFVAYYIHWINKWRDSKFNGVLPPGTMGLPLIGETIQLSRPSDSLDVHPFIQKKVERYGPIFKTCLAGRPVVVSADAEFNNYIMLQEGRAVEMWYLDTLSKFFGLDTEWLKALGLIHKYIRSITLNHFGAEALRERFLPFIEASSMEALHSWSTQPSVEVKNASALMVFRTSVNKMFGEDAKKLSGNIPGKFTKLLGGFLSLPLNFPGTTYHKCLKDMKEIQKKLREVVDDRLANVGPDVEDFLGQALKDKESEKFISEEFIIQLLFSISFASFESISTTLTLILKLLDEHPEVVKELEAEHEAIRKARADPDGPITWEEYKSMTFTLQVINETLRLGSVTPALLRKTVKDLQVKGYIIPEGWTIMLVTASRHRDPKVYKDPHIFNPWRWKDLDSITIQKNFMPFGGGLRHCAGAEYSKVYLCTFLHILCTKYRWTKLGGGRIARAHILSFEDGLHVKFTPKE

SEQ ID NO: 282 - protein, 701 aa, Siraitia grosvenorii
MKVSPFEFMSAIIKGRMDPSNSSFESTGEVASVIFENRELVAILTTSIAVMIGCFVVLMWRRAGSRKVKNVELPKPLIVHEPEPEVEDGKKKVSIFFGTQTGTAEGFAKALADEAKARYEKATFRVVDLDDYAADDDQYEEKLKNESFAVFLLATYGDGEPTDNAARFYKWFAEGKERGEWLQNLHYAVFGLGNRQYEHFNKIAKVADELLEAQGGNRLVKVGLGDDDQCIEDDFSAWRESLWPELDMLLRDEDDATTVTTPYTAAVLEYRVVFHDSADVAAEDKSWINANGHAVHDAQHPFRSNVVVRKELHTSASDRSCSHLEFNISGSALNYETGDHVGVYCENLTETVDEALNLLGLSPETYFSIYTDNEDGTPLGGSSLPPPFPSCTLRTALTRYADLLNSPKKSALLALAAHASNPVEADRLRYLASPAGKDEYAQSVIGSQKSLLEVMAEFPSAKPPLGVFFAAVAPRLQPRFYSISSSPRMAPSRIHVTCALVYDKMPTGRIHKGVCSTWMKNSVPMEKSHECSWAPIFVRQSNFKLPAESKVPIIMVGPGTGLAPFRGFLQERLALKESGVELGPSILFFGCRNRRMDYIYEDELNNFVETGALSELVIAFSREGPTKEYVQHKMAEKASDIWNLISEGAYLYVCGDAKGMAKDVHRTLHTIMQEQGSLDSSKAESMVKNLQMNGRYLRDVW

SEQ ID NO: 283 - protein, 692 aa, Arabidopsis thaliana [sequence omitted]

SEQ ID NO: 284 - protein, 316 aa, Siraitia grosvenorii
MDEIEHITINTNGIKMHIASVGTGPVVLLLHGFPELWYSWRHQLLYLSSVGYRAIAPDLRGYGDTDSPASPTSYTALHIVGDLVGALDELGIEKVFLVGHDWGAIIAWYFCLFRPDRIKALVNLSVQFIPRNPAIPFIEGFRTAFGDDFYICRFQVPGEAEEDFASIDTAQLFKTSLCNRSSAPPCLPKEIGFRAIPPPENLPSWLTEEDINFYAAKFKQTGFTGALNYYRAFDLTWELTAPWTGAQIQVPVKFIVGDSDLTYHFPGAKEYIHNGGFKRDVPLLEEVVVVKDACHFINQERPQEINAHIHDFINKF

SEQ ID NO: 285 - protein, 317 aa, Siraitia grosvenorii
MDAIEHRTVSVNGINMHVAEKGEGPVVLLLHGFPELWYSWRHQILALSSLGYRAVAPDLRGYGDTDAPGSISSYTCFHIVGDLVALVESLGMDRVFVVAHDWGAMIAWCLCLFRPEMVKAFVCLSVPFRQRNPKMKPVQSMRAFFGDDYYICRFQNPGEIEEEMAQVGAREVLRGILTSRRPGPPILPKGQAFRARPGASTALPSWLSEKDLSFFASKYDQKGFTGPLNYYRAMDLNWELTASWTGVQVKVPVKYIVGDVDMVFTTPGVKEYVNGGGFKKDVPFLQEVVIMEGVGHFINQEKPEEISSHIHDFISKF

SEQ ID NO: 286 - protein, 316 aa, Siraitia grosvenorii
MDQIEHITINTNGIKMHIASVGTGPVVLLLHGFPELWYSWRHQLLYLSSVGYRAIAPDLRGYGDTDSPASPTSYTALHIVGDLVGALDELGIEKVFLVGHDWGAIIAWYFCLFRPDRIKALVNLSVQFIPRNPAIPFIEGFRTAFGDDFYMCRFQVPGEAEEDFASIDTAQLFKTSLCNRSSAPPCLPKEIGFRAIPPPENLPSWLTEEDINYYAAKFKQTGFTGALNYYRAFDLTWELTAPWTGAQIQVPVKFIVGDSDLTYHFPGAKEYIHNGGFKKDVPLLEEVVVVKDACHFINQERPQEINAHIHDFINKF

SEQ ID NO: 287 - protein, 316 aa, Siraitia grosvenorii
MEKIEHTTISTNGINMHVASIGSGPAVLFLHGFPELWYSWRHQLLFLSSMGYRAIAPDLRGFGDTDAPPSPSSYTAHHIVGDLVGLLDQLGIDQVFLVGHDWGAMMAWYFCLFRPDRVKALVNLSVHFLRRHPSIKFVDGFRALLGDDFYFCQFQEPGVAEADFGSVDVATMLKKFLTMRDPRPPMIPKEKGFRALETPDPLPAWLTEEDIDYFAGKFRKTGFTGGFNYYRAFNLTWELTAPWSGSEIKVAAKFIVGDLDLVYHFPGAKEYIHGGGFKKDVPLLEEVVVVDGAAHFINQERPAEISSLIYDFIKKF

SEQ ID NO: 288 - protein, 314 aa, Siraitia grosvenorii
MEKIEHSTIATNGINMHVASAGSGPAVLFLHGFPELWYSWRHQLLYLSSLGYRAIAPDLRGFGDTDAPPSPSSYTAHHIVGDLVGLLDQLGVDQVFLVGHDWGAMMAWYFCLFRPDRVKALVNLSVHFTPRNPAISPLDGFRLMLGDDFYVCKFQEPGVAEADFGSVDTATMFKKFLTMRDPRPPIIPNGFRSLATPEALPSWLTEEDIDYFAAKFAKTGFTGGFNYYRAIDLTWELTAPWSGSEIKVPTKFIVGDLDLVYHFPGVKEYIHGGGFKKDVPFLEEVVVMEGAAHFINQEKADEINSLIYDFIKQF

SEQ ID NO: 289 - protein, 316 aa, Siraitia grosvenorii
MENIEHTTVQTNGIKMHVAAIGTGPPVLLLHGFPELWYSWRHQLLYLSSAGYRAIAPDLRGYGDTDAPPSPSSYTALHIVGDLVGLLDVLGIEKVFLIGHDWGAIIAWYFCLFRPDRIKALVNLSVQFFPRNPTTPFVKGFRAVLGDQFYMVRFQEPGKAEEEFASVDIREFFKNVLSNRDPQAPYLPNEVKFEGVPPPALAPWLTPEDIDVYADKFAETGFTGGLNYYRAFDRTWELTAPWTGARIGVPVKFIVGDLDLTYHFPGAQKYIHGEGFKKAVPGLEEVVVMEDTSHFINQERPHEINSHIHDFFSKFC

SEQ ID NO: 290 - protein, 316 aa, Siraitia grosvenorii
MDQIEHITINTNGIKMHIASVGTGPVVLLLHGFPELWYSWRHQLLYLSSVGYRAIAPDLRGYGDTDSPASPTSYTALHIVGDLVGALDELGIEKVFLVGHDWAAIIAWYFCLFRPDRIKALVNLSVQFIPRNPAIPFIEGFRTAFGDDFYMCRFQVPGEAEEDFASIDTAQLFKTSLCNRSSAPPCLPKEIGFRAIPPPENLPSWLTEEDINYYAAKFKQTGFTGALNYYRAFDLTWELTAPWTGAQIQVPVKFIVGDSDLTYHFPGAKEYIHNGGFKKDVPLLEEVVVVKDACHFINQERPQEINAHIHDFINKF

SEQ ID NO: 291 - protein, 313 aa, Siraitia grosvenorii
MEKIEHSTIATNGINMHVASAGSGPAVLFLHGFPELWYSWRHQLLYLSSLGYRAIAPDLRGFGDTDAPPSPSSYTAHHIVGDLVGLLDQLGVDQVFLVGDWGAMMAWYFCLFRPDRVKALVNLSVHFTPRNPAISPLDGFRLMLGDDFYVCKFQEPGVAEADFGSVDTATMFKKFLTMRDPRPPIIPNGFRSLATPEALPSWLTEEDIDYFAAKFAKTGFTGGFNYYRAIDLTWELTAPWSGSEIKVPTKFIVGDLDLVYHFPGVKEYIHGGGFKKDVPFLEEVVVMEGAAHFINQEKADEINSLIYDFIKQF

SEQ ID NO: 292 - protein, 316 aa, Siraitia grosvenorii; identical to SEQ ID NO: 287

SEQ ID NO: 293 - protein, 528 aa, Siraitia grosvenorii
MVDQCALGWILASALGLVIALCFFVAPRRNHRGVDSKERDECVQSAATTKGECRFNDRDVDVIVVGAGVAGSALAHTLGKDGRRVHVIERDLTEPDRIVGELLQPGGYLKLIELGLQDCVEEIDAQRVYGYALFKDGKNTRLSYPLENFHSDVSGRSFHNGRFIQRMREKAASLPNVRLEQGTVTSLLEEKGTIKGVQYKSKNGEEKTAYAPLTIVCDGCFSNLRRSLCNPMVDVPSYFVGLVLENCELPFANHGHVILGDPSPILFYQISRTEIRCLVDVPGQKVPSIANGEMEKYLKTVVAPQVPPQIYDSFIAAIDKGNIRTMPNRSMPAAPHPTPGALLMGDAFNMRHPLTGGGMTVALSDIVVLRNLLKPLKDLSDASTLCKYLESFYTLRKPVASTINTLAGALYKVFCASPDQARKEMRQACFDYLSLGGIFSNGPVSLLSGLNPRPLSLVLHFFAVAIYGVGRLLLPFPSVKGIWIGARLIYSASGIIFPIIRAEGVRQMFFPATVPAYYRSPPVFKPIV

SEQ ID NO: 294 - protein, 524 aa, Siraitia grosvenorii
MVDQCALGWILASVLGAAALYFLFGRKNGGVSNERRHESIKNIATTNGEYKSSNSDGDIIIVGAGVAGSALAYTLGKDGRRVHVIERDLTEPDRIVGELLQPGGYLKLTELGLEDCVDDIDAQRVYGYALFKDGKDTRLSYPLEKFHSDVAGRSFHNGRFIQRMREKAASLPKVSLEQGTVTSLLEENGIIKGVQYKTKTGQEMTAYAPLTIVCDGCFSNLRRSLCNPKVDVPSCFVGLVLENCDLPYANHGHVILADPSPILFYRISSTEIRCLVDVPGQKVPSISNGEMANYLKNVVAPQIPSQLYDSFVAAIDKGNIRTMPNRSMPADPYPTPGALLMGDAFNMRHPLTGGGMTVALSDVVVLRDLLKPLRDLNDAPTLSKYLEAFYTLRKPVASTINTLAGALYKVFCASPDQARKEMRQACFDYLSLGGIFSNGPVSLLSGLNPRPISLVLHFFAVAIYGVGRLLIPFPSPKRVWIGARIISGASAIIFPIIKAEGVRQMFFPATVAAYYRAPRVVKGR

SEQ ID NO: 295 - protein, 512 aa, Lactuca sativa
MDGVIDMQTIPLRTAIAIGGTAVALVVALYFWFLRSYASPSHHSNHLPPVPEVPGVPVLGNLLQLKEKKPYMTFTKWAEMYGPIYSIRTGATSMVVVSSNEIAKEVVVTRFPSISTRKLSYALKVLTEDKSMVAMSDYHDYHKTVKRHILTAVLGPNAQKKFRAHRDTMMENVSNELHAFFEKNPNQEVNLRKIFQSQLFGLAMKQALGKDVESIYVKDLETTMKREEIFEVLVVDPMMGAIEVDWRDFFPYLKWVPNKSFENIIHRMYTRREAVMKALIQEHKKRIASGENLNSYIDYLLSEAQTLTDKQLLMSLWEPIIESSDTTMVTTEWAMYELAKNPNMQDRLYEEIQSVCGSEKITEENLSQLPYLYAVFQETLRKHCPVPIMPLRYVHENTVLGGYHVPAGTEVAINIYGCNMDKKVWENPEEWNPERFLSEKESMDLYKTMAFGGGKRVCAGSLQAMVISCIGIGRLVQDFEWKLKDDAEEDVNTLGLTTQKLHPLLALINPRK

SEQ ID NO: 296 - DNA, 1563 bp, Artificial Sequence
  Synthetic
atggaaatgtcctcaagtgtcgcagccacaatcagtatctggatggtcgtcgtatgtatcgtaggtgtaggttggagagtcgtaaattgggtttggttgagaccaaagaaattggaaaagagattgagagaacaaggtttggccggtaattcttacagattgttgttcggtgacttgaaggaaagagctgcaatggaagaacaagcaaattcaaagcctataaacttctcccatgacatcggtccaagagttttcccttcaatgtacaagaccatccaaaactacggtaaaaactcctacatgtggttaggtccataccctagagtccacatcatggatccacaacaattgaagaccgtttttactttggtctacgacattcaaaagccaaatttgaaccctttgattaaattcttgttagatggtatcgttacacatgaaggtgaaaagtgggctaagcacagaaagattattaacccagcattccatttggaaaagttgaaggatatgatacctgctttctttcactcatgtaatgaaatcgtcaacgaatgggaaagattgatttcaaaagaaggttcctgcgaattggatgtaatgccttatttgcaaaatttggccgctgacgccatttcaagaaccgcttttggttcttcatacgaagaaggtaaaatgatcttccaattgttgaaggaattgactgatttggttgtcaaggtagcttttggtgtttatattccaggttggagattcttgcctacaaagagtaacaacaaaatgaaggaaattaatagaaaaatcaagtctttgttgttgggtatcattaacaagagacaaaaggcaatggaagaaggtgaagccggtcaatctgatttgttgggtatattaatggaaagtaattctaacgaaatccaaggtgaaggtaataacaaggaagatggcatgtctattgaagacgtcatcgaagagtgtaaggtattttatataggtggtcaagaaactacagcaagattattgatctggactatgatattgttgtccagtcatacagaatggcaagaaagagccagaaccgaagtcttgaaggtatttggtaataagaaaccagatttcgacggtttgtcaagattgaaggtagttactatgatcttgaacgaagttttaagattgtacccacctgcttccatgttgacaagaatcatccaaaaggaaacaagagttggtaaattaaccttgccagcaggtgttatcttgataatgcctatcatcttgatacatagagatcacgacttgtggggtgaagatgctaacgagtttaaaccagaaagattcagtaaaggtgtttctaaggcagccaaagtccaaccagcctttttcccttttggttggggtcctagaatttgcatgggtcaaaacttcgctatgatcgaagctaagatggcattgagtttgatcttgcaaagattttctttcgaattgtcttcatcctacgttcatgcaccaactgtcgtcttcactacacaaccacaacacggtgcccacatcgttttgagaaagttatga

SEQ ID NO: 297 - DNA, 2079 bp, Artificial Sequence
  Synthetic
atgacctctgcattgtatgcttctgatcttttcaaacaattaaagagtataatgggtactgactccttgtctgatgatgtagttttggtaatagctactacatctttagctctagtcgctggttttgtggtcttgctttggaagaagactactgctgatagatccggtgaattgaaacctctgatgattcctaaatctttgatggctaaagatgaagacgatgatttggacctgggctctggtaagacaagagtttctattttttttggtactcaaactggtactgccgagggttttgctaaggctttgtctgaggaaattaaagctagatatgaaaaggccgcagttaaggtgattgatttggatgactatgctgctgatgatgatcaatacgaagaaaaattgaagaaagaaactttggcattcttctgtgtggctacttacggtgatggtgaaccaactgacaacgctgctagattttataaatggttcactgaggaaaatgaaagagatattaagttacaacaattggcttatggtgtttttgccctaggaaatagacaatacgagcattttaataaaatcggtatcgttttggacgaggaactatgtaagaaaggtgctaaaagattaattgaagttggtttaggtgatgacgatcaatcaattgaagatgactttaacgcttggaaagagtctttgtggtctgagttggataaactgttgaaggatgaagatgacaaatcagtagcaacaccatatactgctgttataccagaatatagagttgttactcatgatccaagatttactactcagaaatctatggagtctaatgttgctaacggtaatactactattgatattcatcatccatgcagagtagacgttgccgttcaaaaagaattgcatacccatgagtccgatagatcttgtatccatcttgagttcgatatttctaggactggtattacctatgaaactggtgaccatgtgggtgtttatgcagaaaatcatgtcgaaatagttgaagaagctggtaagttgttgggtcattccttggacctggtcttttctatccatgctgacaaagaagatggaagtccattggaatctgctgtccctccaccatttccaggaccatgcactttgggtactggtttggctagatatgcagacttgttgaatccaccaagaaaatcagcattggttgctctggctgcttatgcaaccgagcctagtgaagctgaaaaattgaagcatcttacttctccagatggtaaagatgaatactctcaatggattgttgcttctcaaagaagtttattagaagtaatggcagcatttccatctgctaaaccaccattaggtgttttctttgctgctatcgctccaagattacagccaagatattattcaatatcttcttcaccaagattggctccatctagggttcatgtcacttctgctctagtttacggtccaacaccaactggtagaatccataagggtgtttgttccacttggatgaagaatgctgttccagcagagaaatctcatgaatgctctggtgctccaatttttataagagcttctaactttaaattaccatctaatccatctactccaatagtaatggtaggaccaggtactggtttagcaccatttagaggtttccttcaagaaagaatggctttaaaagaggacggtgaagaactgggttcttctctgttattctttggttgtagaaatagacaaatggactttatttacgaagatgaattgaataattttgttgatcagggagtaatttccgagttgataatggctttttctagggaaggtgctcaaaaagagtacgtccaacataaaatgatggaaaaagctgctcaggtatgggatttaattaaagaagaaggttatttgtatgtatgcggtgacgctaaaggtatggcaagagacgtacatagaactttgcatactatagtgcaagaacaagaaggtgtgtcttctagtgaagctgaggccattgttaagaaactacaaactgaaggtagatatctgagagacgtatggtaa

SEQ ID NO: 298 - DNA, 2106 bp, Artificial Sequence; identical to SEQ ID NO: 266
  Synthetic

SEQ ID NO: 299 - DNA, 2280 bp, Artificial Sequence
  Synthetic
atgtggaggcttaaagtaggcgcggaatcagtcggggagaatgacgaaaagtggctgaaaagcattagtaaccacttgggtcgccaggtgtgggaattttgcccagatgcaggtacgcaacaacaactattacaggttcataaggctagaaaagccttccatgatgaccgttttcacagaaagcaatcgtccgatttgttcatcaccatacaatatggaaaagaggttgaaaatggaggtaagacagctggcgtaaaactcaaggagggtgaagaagttagaaaggaggcagtcgaatcttctttggaacgggctttatcgttttactcttcaattcaaacttccgatggtaactgggccagtgacctgggtggtccgatgtttttactacccggcttggttatcgccctttatgtaaccggcgtcctgaatagcgtgctatccaaacatcataggcaggaaatgtgtcgatacgtttataaccaccaaaatgaggatgggggttggggattacatattgaaggaccttcaacaatgttcgggtctgcacttaattatgtcgctttgagactcttaggcgaagacgcaaacgctggtgccatgccaaaagcaagagcgtggatattggatcacggaggtgcgactggtatcacgtcatggggcaaactttggctctcggttttaggagtgtacgagtggagtggcaataatcctctaccacctgaattttggctgtttccttatttcttgccgttccatcccgggcgaatgtggtgtcattgcagaatggtatatttaccaatgagttacctctatggtaagcgttttgtaggtccaattactcctatagttttgtctttacgcaaagaactatacgctgtcccataccatgagatcgattggaacaagtcgcgtaatacatgtgctaaagaagatctttattacccccacccgaaaatgcaggacattctgtgggggtcattgcatcacgtttatgagcccttatttaccagatggccggcgaaaagactaagggaaaaggctttgcaaactgccatgcaacatatacactacgaagatgaaaacacaagatacatttgtttagggcctgtaaataaagtgttgaatttactttgctgttgggtagaagacccatatagcgatgcatttaagctccatttgcagagggttcacgactatttatgggtcgctgaagatggaatgaaaatgcaaggttataatggatctcaattgtgggacacagcatttagcattcaggccattgtctctactaaactcgttgataactacggcccaacgctacggaaggcccatgatttcgtgaaaagcagtcagatacaacaagattgccctggcgatccaaacgtgtggtataggcatatacacaagggtgcttggccattctcaacaagagatcatggttggctgatctccgattgtacagctgagggattaaaggcggcattaatgttgtctaaattaccgagtgaaaccgttggtgagagcttggaaagaaatagactgtgtgatgccgtgaatgtgttgctttccctgcaaaatgacaatggaggtttcgcgtcgtatgaactaactcgatcttatccttggttagaacttatcaaccccgcagaaacctttggggatattgttatcgattatccatacgtggagtgtacttcagcaaccatggaggctttgacactgtttaaaaaacttcatcctggacatcgtactaaggaaattgatacggccatagtacgcgcagctaactttctagaaaatatgcaaagaactgatggtagttggtacggttgctggggcgtttgtttcacttacgctggctggtttggaattaaaggtctagtagctgccggacgtacatataacaattgcttggccattagaaaggcttgtgactttctcttatcaaaagaactacctggtggtgggtggggagagtcttatcttagctgccagaacaaagtatatactaatttggaaggcaacaggccacaccttgttaacacagcatgggtattgatggctctgattgaagctggtcaagctgaacgtgacccaacgcccttacacagagcagcaagactgctgatcaattcacagttagaaaatggtgatttccctcagcaagagatcatgggcgtttttaacaagaattgtatgattacttacgccgcatatcgtaacatatttccgatttgggcattaggggaatactgccatagggtgcttactgaataa

SEQ ID NO: 300 - DNA, 951 bp, Artificial Sequence
  Synthetic
atggatcagatcgagcacattactataaataccaacggcattaaaatgcatatagcgtcagtagggacaggaccagttgtcctgcttctacatggtttccccgaattgtggtactcttggcgtcaccaattgttatatttatcgagtgtgggttatagggcaatcgcccctgacctgagaggttacggcgatacggattccccggcatctccaactagctatacagctctccatattgttggagacttggtgggtgctttagatgaactaggaattgaaaaggtttttctagtcggtcatgactggggcgccataatcgcttggtatttttgccttttccgccctgatcgaattaaagctttggtaaatttatcagttcaatttataccgagaaacccagcaattcctttcatcgaaggttttcgtaccgcgtttggcgacgatttttacatgtgtagattccaggtcccaggagaggcagaggaagattttgcctctatagacactgctcaacttttcaagaccagtctatgtaatagatcctcagcgcccccttgcctcccaaaagaaattgggttcagggccattcccccacctgaaaatttgcctagctggctgacggaggaagatatcaactattacgctgcaaagtttaaacaaacaggtttcactggtgccctcaattactatagagcatttgatcttacttgggaattaacagctccatggactggtgctcaaatacaggttccagtaaaatttatcgtaggagattccgatttgacgtatcattttcccggagcaaaggagtacattcacaacgggggcttcaaaaaagacgtgcctttattggaagaggttgtggtagttaaggatgcatgtcacttcatcaaccaagaaagacctcaagaaattaatgctcatattcatgactttataaataagttctaa

SEQ ID NO: 301 - DNA, 951 bp, Artificial Sequence
  Synthetic
atggagaagattgaacacacaacgatctcgaccaacggtataaatatgcatgtggcatcaattggctctggacccgccgtacttttcttgcatggttttccagaactatggtacagctggaggcaccagttactgtttttaagttccatggggtatagagcgatagctccggacttgcgcggattcggtgatactgatgctccaccttcgcctagttcatataccgcacatcatattgtcggggacttggttggcctattagatcaactcggtatcgatcaagtttttttggtcggacacgactggggtgccatgatggcgtggtacttttgtctgttccgtccagatcgagtgaaagctcttgttaatttatctgttcatttcctaagaagacacccatccattaaatttgtagatgggtttagggcacttttaggagatgacttctatttttgccaatttcaggaacctggcgtggcagaggctgattttggttccgtagacgttgccacaatgttaaagaaattcttgactatgcgggatccaagacccccaatgataccgaaggaaaaaggttttagagctttggaaacacctgatccgctccctgcgtggttaactgaagaagacatcgattacttcgccggtaaatttcgtaagacgggtttcactggaggctttaactattatcgcgctttcaatctgacatgggagctaacagcaccctggtcgggttctgaaataaaggtggcagctaaatttattgtcggagaccttgacttagtttaccattttcctggtgcgaaggagtatattcatggagggggcttcaaaaaagatgtacccttgctagaagaggtcgttgtcgtggatggcgctgcccattttataaatcaagaaagaccagcagagattagctctctaatctacgactttatcaaaaagttctaa

SEQ ID NO: 302 - DNA, 1335 bp, Artificial Sequence
  Synthetic
atgggaaagctattacaattggcattgcatccggtcgagatgaaggcagctttgaagctgaagttttgcagaacaccgctattctccatctatgatcagtccacgtctccatatctcttgcactgtttcgaactgttgaacttgacctccagatcgtttgctgctgtgatcagagagctgcatccagaattgagaaactgtgttactctcttttatttgattttaagggctttggataccatcgaagacgatatgtccatcgaacacgatttgaaaattgacttgttgcgtcacttccacgagaaattgttgttaactaaatggagtttcgacggaaatgcccccgatgtgaaggacagagccgttttgacagatttcgaatcgattcttattgaattccacaaattgaaaccagaatatcaagaagtcatcaaggagatcaccgagaaaatgggtaatggtatggccgactacatcttggatgaaaattacaacttgaatgggttgcaaaccgtccacgactacgacgtgtactgtcactacgtagctggtttggtcggtgatggtttgacccgtttgattgtcattgccaagtttgccaacgaatctttgtattctaatgagcaattgtatgaaagcatgggtcttttcctacaaaaaaccaacatcatcagagactacaatgaagatttggtcgatggtagatccttctggcccaaggaaatctggtcacaatacgctcctcagttgaaggacttcatgaaacctgaaaacgaacaactggggttggactgtataaaccacctcgtcttaaacgcattgagtcatgttatcgatgtgttgacttatttggccagtatccacgagcaatccactttccaattttgtgccattccccaagttatggccattgcaaccttggctttggtattcaacaaccgtgaagtgctacatggcaatgtaaagattcgtaagggtactacctgctatttaattttgaaatcaaggactttgcgtggctgtgtcgagatttttgactattacttacgtgatatcaaatctaaattggctgtgcaagatccaaatttcttaaaattgaacattcaaatctccaagatcgaacaattcatggaagaaatgtaccaggataaattacctcctaacgtgaagccaaatgaaactccaattttcttgaaagttaaagaaagatccagatacgatgatgaattggtcccaacccaacaagaagaagagtacaagttcaatatggttttatctatcatcttgtccgttcttcttgggttttattatatatacactttacacagagcgtga

SEQ ID NO: 303 - DNA, 1491 bp, Artificial Sequence
  Synthetic
atgtctgctgttaacgttgcacctgaattgattaatgccgacaacacaattacctacgatgcgattgtcatcggtgctggtgttatcggtccatgtgttgctactggtctagcaagaaagggtaagaaagttcttatcgtagaacgtgactgggctatgcctgatagaattgttggtgaattgatgcaaccaggtggtgttagagcattgagaagtctgggtatgattcaatctatcaacaacatcgaagcatatcctgttaccggttataccgtctttttcaacggcgaacaagttgatattccatacccttacaaggccgatatccctaaagttgaaaaattgaaggacttggtcaaagatggtaatgacaaggtcttggaagacagcactattcacatcaaggattacgaagatgatgaaagagaaaggggtgttgcttttgttcatggtagattcttgaacaacttgagaaacattactgctcaagagccaaatgttactagagtgcaaggtaactgtattgagatattgaaggatgaaaagaatgaggttgttggtgccaaggttgacattgatggccgtggcaaggtggaattcaaagcccacttgacatttatctgtgacggtatcttttcacgtttcagaaaggaattgcacccagaccatgttccaactgtcggttcttcgtttgtcggtatgtctttgttcaatgctaagaatcctgctcctatgcacggtcacgttattcttggtagtgatcatatgccaatcttggtttaccaaatcagtccagaagaaacaagaatcctttgtgcttacaactctccaaaggtcccagctgatatcaagagttggatgattaaggatgtccaacctttcattccaaagagtctacgtccttcatttgatgaagccgtcagccaaggtaaatttagagctatgccaaactcctacttgccagctagacaaaacgacgtcactggtatgtgtgttatcggtgacgctctaaatatgagacatccattgactggtggtggtatgactgtcggtttgcatgatgttgtcttgttgattaagaaaataggtgacctagacttcagcgaccgtgaaaaggttttggatgaattactagactaccatttcgaaagaaagagttacgattccgttattaacgttttgtcagtggctttgtattctttgttcgctgctgacagcgataacttgaaggcattacaaaaaggttgtttcaaatatttccaaagaggtggcgattgtgtcaacaaacccgttgaatttctgtctggtgtcttgccaaagcctttgcaattgaccagggttttcttcgctgtcgctttttacaccatttacttgaacatggaagaacgtggtttcttgggattaccaatggctttattggaaggtattatgattttgatcacagctattagagtattcaccccatttttgtttggtgagttgattggttaa

SEQ ID NO: 304 - DNA, 2196 bp, Artificial Sequence
  Synthetic
atgacagaattttattctgacacaatcggtctaccaaagacagatccacgtctttggagactgagaactgatgagctaggccgagaaagctgggaatatttaacccctcagcaagccgcaaacgacccaccatctacctttacacaatggctactgcaagatcccaaatttcctcaacctcatccagaaagaaataagcattcaccagatttttcagccttcgatgcgtgtcataatggtgcatcttttttcaaactgcttcaagagcctgactcaggtatttttccgtgtcaatataaaggacccatgttcatgacaatcggttacgtagccgtaaactatatcgccggtattgaaattcctgagcatgagagaatagaattaattagatacatcgtcaatactgctcaccctgtcgacggaggttggggtctacattctgttgacaaatccaccgtgtttggtacagtattgaactatgtaatcttacgtttattgggtctacccaaggaccacccggtttgcgccaaggcaagaagcacattgttaaggttaggcggtgctattggatcccctcactggggaaaaatttggctaagtgcactaaacttgtataaatgggaaggtgtgaaccctgcccctcctgaaacttggttacttccatattcactgcccatgcatccggggagatggtgggttcatactagaggtgtttacattccggtcagttacctgtcattggtcaaattttcttgcccaatgactcctcttcttgaagaactgaggaatgaaatttacactaaaccgtttgacaagattaacttctccaagaacaggaataccgtatgtggagtagacctatattacccccattctactactttgaatattgcgaacagccttgtagtattttacgaaaaatacctaagaaaccggttcatttactctctatccaagaagaaggtttatgatctaatcaaaacggagttacagaatactgattccttgtgtatagcacctgttaaccaggcgttttgcgcacttgtcactcttattgaagaaggggtagactcggaagcgttccagcgtctccaatataggttcaaggatgcattgttccatggtccacagggtatgaccattatgggaacaaatggtgtgcaaacctgggattgtgcgtttgccattcaatactttttcgtcgcaggcctcgcagaaagacctgaattctataacacaattgtctctgcctataaattcttgtgtcatgctcaatttgacaccgagtgcgttccaggtagttatagggataagagaaagggggcttggggcttctcaacaaaaacacagggctatacagtggcagattgcactgcagaagcaattaaagccatcatcatggtgaaaaactctcccgtctttagtgaagtacaccatatgattagcagtgaacgtttatttgaaggcattgatgtgttattgaacctacaaaacatcggatcttttgaatatggttcctttgcaacctatgaaaaaatcaaggccccactagcaatggaaaccttgaatcctgctgaagtttttggtaacataatggtagaatacccatacgtggaatgtactgattcatccgttctggggttgacatattttcacaagtacttcgactataggaaagaggaaatacgtacacgcatcagaatcgccatcgaattcataaaaaaatctcaattaccagatggaagttggtatggaagctggggtatttgttttacatatgccggtatgtttgcattggaggcattacacaccgtgggggagacctatgagaattcctcaacggtaagaaaaggttgcgacttcttggtcagtaaacagatgaaggatggcggttggggggaatcaatgaagtccagtgaattacatagttatgtggatagtgaaaaatcgctagtcgttcaaaccgcatgggcgctaattgcacttcttttcgctgaatatcctaataaagaagtcatcgaccgcggtattgaccttttaaaaaatagacaagaagaatccggggaatggaaatttgaaagtgtagaaggtgttttcaaccactcttgtgcaattgaatacccaagttatcgattcttattccctattaaggcattaggtatgtacagcagggcatatgaaacacatacgctttaa

SEQ ID NO: 305 - protein, 520 aa, Siraitia grosvenorii; identical to SEQ ID NO: 280

SEQ ID NO: 306 - protein, 692 aa, Arabidopsis thaliana [sequence omitted]

SEQ ID NO: 307 - protein, 701 aa, Siraitia grosvenorii; identical to SEQ ID NO: 282

SEQ ID NO: 308 - protein, 759 aa, Siraitia grosvenorii; identical to SEQ ID NO: 247

SEQ ID NO: 309 - protein, 316 aa, Siraitia grosvenorii; identical to SEQ ID NO: 286

SEQ ID NO: 310 - protein, 316 aa, Siraitia grosvenorii; identical to SEQ ID NO: 287

SEQ ID NO: 311 - protein, 444 aa, Saccharomyces cerevisiae
MGKLLQLALHPVEMKAALKLKFCRTPLFSIYDQSTSPYLLHCFELLNLTSRSFAAVIRELHPELRNCVTLFYLILRALDTIEDDMSIEHDLKIDLLRHFHEKLLLTKWSFDGNAPDVKDRAVLTDFESILIEFHKLKPEYQEVIKEITEKMGNGMADYILDENYNLNGLQTVHDYDVYCHYVAGLVGDGLTRLIVIAKFANESLYSNEQLYESMGLFLQKTNIIRDYNEDLVDGRSFWPKEIWSQYAPQLKDFMKPENEQLGLDCINHLVLNALSHVIDVLTYLASIHEQSTFQFCAIPQVMAIATLALVFNNREVLHGNVKIRKGTTCYLILKSRTLRGCVEIFDYYLRDIKSKLAVQDPNFLKLNIQISKIEQFMEEMYQDKLPPNVKPNETPIFLKVKERSRYDDELVPTQQEEEYKFNMVLSIILSVLLGFYYIYTLHRA

SEQ ID NO: 312 - protein, 496 aa, Saccharomyces cerevisiae
MSAVNVAPELINADNTITYDAIVIGAGVIGPCVATGLARKGKKVLIVERDWAMPDRIVGELMQPGGVRALRSLGMIQSINNIEAYPVTGYTVFFNGEQVDIPYPYKADIPKVEKLKDLVKDGNDKVLEDSTIHIKDYEDDERERGVAFVHGRFLNNLRNITAQEPNVTRVQGNCIEILKDEKNEVVGAKVDIDGRGKVEFKAHLTFICDGIFSRFRKELHPDHVPTVGSSFVGMSLFNAKNPAPMHGHVILGSDHMPILVYQISPEETRILCAYNSPKVPADIKSWMIKDVQPFIPKSLRPSFDEAVSQGKFRAMPNSYLPARQNDVTGMCVIGDALNMRHPLTGGGMTVGLHDVVLLIKKIGDLDFSDREKVLDELLDYHFERKSYDSVINVLSVALYSLFAADSDNLKALQKGCFKYFQRGGDCVNKPVEFLSGVLPKPLQLTRVFFAVAFYTIYLNMEERGFLGLPMALLEGIMILITAIRVFTPFLFGELIG

SEQ ID NO: 313 - protein, 731 aa, Saccharomyces cerevisiae
MTEFYSDTIGLPKTDPRLWRLRTDELGRESWEYLTPQQAANDPPSTFTQWLLQDPKFPQPHPERNKHSPDFSAFDACHNGASFFKLLQEPDSGIFPCQYKGPMFMTIGYVAVNYIAGIEIPEHERIELIRYIVNTAHPVDGGWGLHSVDKSTVFGTVLNYVILRLLGLPKDHPVCAKARSTLLRLGGAIGSPHWGKIWLSALNLYKWEGVNPAPPETWLLPYSLPMHPGRWWVHTRGVYIPVSYLSLVKFSCPMTPLLEELRNEIYTKPFDKINFSKNRNTVCGVDLYYPHSTTLNIANSLVVFYEKYLRNRFIYSLSKKKVYDLIKTELQNTDSLCIAPVNQAFCALVTLIEEGVDSEAFQRLQYRFKDALFHGPQGMTIMGTNGVQTWDCAFAIQYFFVAGLAERPEFYNTIVSAYKFLCHAQFDTECVPGSYRDKRKGAWGFSTKTQGYTVADCTAEAIKAIIMVKNSPVFSEVHHMISSERLFEGIDVLLNLQNIGSFEYGSFATYEKIKAPLAMETLNPAEVFGNIMVEYPYVECTDSSVLGLTYFHKYFDYRKEEIRTRIRIAIEFIKKSQLPDGSWYGSWGICFTYAGMFALEALHTVGETYENSSTVRKGCDFLVSKQMKDGGWGESMKSSELHSYVDSEKSLVVQTAWALIALLFAEYPNKEVIDRGIDLLKNRQEESGEWKFESVEGVFNHSCAIEYPSYRFLFPIKALGMYSRAYETHTL

SEQ ID NO: 314 - DNA, 1422 bp, Artificial Sequence
  Synthetic
atgtggactgtcgtgctcggtttggcgacgctgtttgtcgcctactacatccattggattaacaaatggagagattccaagttcaacggagttctgccgccgggcaccatgggtttgccgctcatcggagaaacgattcaactgagtcgacccagtgactccctcgacgttcaccctttcatccagaaaaaagttgaaagatacgggccgatcttcaaaacatgtctggccggaaggccggtggtggtgtcggcggacgcagagttcaacaactacataatgctgcaggaaggaagagcagtggaaatgtggtatttggatacgctctccaaatttttcggcctcgacaccgagtggctcaaagctctgggcctcatccacaagtacatcagaagcattactctcaatcacttcggcgccgaggccctgcgggagagatttcttccttttattgaagcatcctccatggaagcccttcactcctggtctactcaacctagcgtcgaagtcaaaaatgcctccgctctcatggtttttaggacctcggtgaataagatgttcggtgaggatgcgaagaagctatcgggaaatatccctgggaagttcacgaagcttctaggaggatttctcagtttaccactgaattttcccggcaccacctaccacaaatgcttgaaggatatgaaggaaatccagaagaagctaagagaggttgtagacgatagattggctaatgtgggccctgatgtggaagatttcttggggcaagcccttaaagataaggaatcagagaagttcatttcagaggagttcatcatccaactgttgttttctatcagttttgctagctttgagtccatctccaccactcttactttgattctcaagctccttgatgaacacccagaagtagtgaaagagttggaagctgaacacgaggcgattcgaaaagctagagcagatccagatggaccaattacttgggaagaatacaaatccatgacttttacattacaagtcatcaatgaaaccctaaggttggggagtgtcacacctgccttgttgaggaaaacagttaaagatcttcaagtaaaaggatacataatcccggaaggatggacaataatgcttgtcaccgcttcacgtcacagagatccaaaagtctataaggaccctcatatcttcaatccatggcgttggaaggacttggactcaattaccatccaaaagaacttcatgccttttgggggaggcttaaggcattgtgctggtgctgagtactctaaagtctacttgtgcaccttcttgcacatcctctgtaccaaataccgatggaccaaacttgggggaggaaggattgcaagagctcatatattgagttttgaagatgggttacatgtgaagttcacgccaaaagaataa

SEQ ID NO: 315 - protein, 473 aa, Siraitia grosvenorii; identical to SEQ ID NO: 281

SEQ ID NO: 316 - DNA, 537 bp, Artificial Sequence
  Synthetic
atggctctgcaagtctgggagactctcaaggaggccattgtcgcttacaccggtctgtctcccgctaccttcttcactgtgctcgctcttggtttggccgtctactacgtcatttcgggcttcttcggcacctcggactacggctctcactctcgagatttcggtgagcagatgcagcccctgcctcctcccgtccaggttggtgagatctctgaggaggagctcaagcagtacgacggcagtgactccaagaagcctcttctcatggccatcaagggccagatttacgatgtcagccagagccgaatgttctacggacccggtggcccttacgctctgtttgccggcaaggatgcttctcgagctctggccaaaatgtcatttgaagagaaggacctgactggtgacatttccggactcggcccattcgagcttgaggccctccaggattgggaatacaagttcatgtccaagtacgttaaggtcggcaccgttgagaagcccgtcagcgagacagtcgctgccaaggttgagtag

SEQ ID NO: 317 - DNA, 642 bp, Artificial Sequence
  Synthetic
atggctctgcaagtctgggagactctcaaggaggccattgtcgcttacaccggtctgtctcccgctaccttcttcactgtgctcgctcttggtttggccgtctactacgtcatttcgggcttcttcggcacctcggactacggctctcactctcgagatttcggtgagcagatgcagcccctgcctcctcccgtccaggttggtgagatctctgaggaggagctcaagcagtacgacggcagtgactccaagaagcctcttctcatggccatcaagggccagatttacgatgtcagccagagccgaatgttctacggacccggtggcccttacgctctgtttgccggcaaggatgcttctcgagctctggccaaaatgtcatttgaagagaaggacctgactggtgacatttccggactcggcccattcgagcttgaggccctccaggattgggaatacaagttcatgtccaagtacgttaaggtcggcaccgttgagaagcccgtcagcgagacagacgctgctcccgccggtgagtctgctgagtccaccaacgccgaggtgtccaagcccgctgaggacggtccttccgagtcccaggccgacaaggctgaggagacagtcgctgccaaggttgagtag

SEQ ID NO: 318 - protein, 178 aa, Artificial Sequence
  Synthetic
MALQVWETLKEAIVAYTGLSPATFFTVLALGLAVYYVISGFFGTSDYGSHSRDFGEQMQPLPPPVQVGEISEEELKQYDGSDSKKPLLMAIKGQIYDVSQSRMFYGPGGPYALFAGKDASRALAKMSFEEKDLTGDISGLGPFELEALQDWEYKFMSKYVKVGTVEKPVSETVAAKVE

SEQ ID NO: 319 - DNA, 2280 bp, Artificial Sequence
  Synthetic
atgtggcgactgaaggttggtgctgagtccgtaggcgaaaatgacgagaagtggctcaaatctatcagtaaccatcttggaagacaagtgtgggagttttgccctgatgccgggactcagcagcagctgttgcaggtccacaaggcccgtaaggcattccacgacgaccgattccaccgaaagcagtcgtctgaccttttcattaccatccagtatggtaaggaggttgagaacggtggcaagaccgctggtgtcaagctgaaggagggtgaggaggtccgcaaggaggccgttgagtcctctctcgaacgagcgctctccttttactcctctattcagacctccgatggcaactgggccagcgatctgggtggtcccatgttcttactgcccggattggtcatcgccctctacgttacgggtgtgctaaactctgttctgtccaagcaccatcgacaggagatgtgtcggtacgtctacaaccaccaaaacgaggacggtggctggggtcttcacattgagggaccatctaccatgttcggttcagctctaaactacgtcgccctccgactgcttggggaggacgctaacgccggtgcaatgcccaaggctcgagcctggatcctcgaccacggcggtgctactggtatcacctcctggggtaagctctggctgagtgtgcttggcgtctacgagtggtccggcaacaaccccctccctcccgagttctggctgtttccctacttcctgcctttccatcccggaaggatgtggtgtcactgccgaatggtctacttgcccatgtcttatctctacggtaagcgattcgttggtcccatcacccctatcgtcctgtcccttcgaaaggagctttacgccgtcccgtaccacgagattgattggaacaagtcccgaaacacttgtgccaaggaggacctctactaccctcaccccaagatgcaggacattctgtggggctcccttcatcacgtgtacgagcccctgttcacccgatggcccgctaagcgacttcgagagaaggccttgcagacagccatgcagcacatccactacgaagacgaaaatacccgatacatctgcctgggtcccgtcaacaaggttctgaacctcttgtgttgttgggtcgaggatccctactctgatgctttcaaactccacctccagcgagttcacgactacctgtgggttgccgaggacggaatgaagatgcagggatacaacggttctcagctctgggatactgcattttcgattcaggccatcgtcagcaccaagctggtagacaactacggaccgacactccgaaaggctcacgactttgttaagtcttcccagatccaacaggactgccccggtgatcccaacgtctggtacagacacattcataaaggtgcctggcctttctccacccgtgaccacggctggctcatttctgattgtaccgctgagggccttaaggccgccctgatgctgtccaagctcccctctgagactgtgggtgagtcgctcgagcgaaaccgactttgcgacgccgtgaacgttctccttagtctccagaacgacaacggtggtttcgcttcctatgagctgacccgttcctacccctggcttgaactgattaaccctgcggagacattcggtgatatcgtcatcgactacccctacgttgagtgtacgtctgccaccatggaggctcttaccctgtttaagaagctccatcctggtcaccgaaccaaggagattgacaccgccatcgtccgagccgctaatttcctggagaacatgcagcgaaccgacgggtcatggtacggttgctggggagtctgttttacctacgccggatggttcggtattaagggtcttgtcgccgctggccgaacttacaacaactgtttggccatcagaaaggcctgcgacttcctcctgtctaaggagctgcccggaggtggctggggcgaatcctatctctcctgtcagaataaggtttacaccaacttagagggtaacaggccccacttggtgaatactgcttgggttcttatggcgctgatcgaggccggtcaggcggagcgagatcccacccccctacaccgagctgcccgactgcttatcaactcccagctcgagaacggtgacttccctcaacaggagattatgggtgtttttaacaagaactgcatgatcacgtacgccgcctaccgaaacatcttccctatctgggctcttggtgaatactgtcaccgagtcctgaccgagtag

SEQ ID NO: 320 - DNA, 1563 bp, Artificial Sequence
  Synthetic
atggagatgtcctcttcagtggctgccacgatttctatctggatggttgtcgtctgtatcgttggagtcggttggcgagtggtcaactgggtttggctgcggcccaaaaagcttgaaaagcgactccgtgagcagggtctggccggcaattcctaccgactcttatttggggacctaaaggagcgagcagctatggaggagcaagccaactcgaagccaattaacttctctcatgatatcggtccccgagtattcccttccatgtataagaccatccagaactacggtaagaactcctacatgtggctcggtccctacccccgagtccacattatggaccctcagcagcttaagacagttttcactctggtctacgacatccagaagccgaacctgaacccccttatcaagtttctgctggatggcatcgtgacccacgagggggagaagtgggcgaagcaccgaaagattatcaaccccgccttccacctcgaaaagctcaaggacatgatccctgctttcttccactcttgcaacgagattgtcaatgagtgggagcgactgatctccaaggagggttcgtgtgagctcgatgttatgccctacctgcaaaacttagccgctgacgccatttcccgaaccgcctttggtagttcttacgaggagggtaagatgattttccagctactgaaggaactcaccgaccttgtcgtcaaggtagctttcggcgtgtacattcccggatggaggttcctgcccaccaagtccaacaacaaaatgaaggagatcaaccgaaagattaagtccctccttcttggtatcatcaataagcgacagaaggccatggaggagggcgaggctggtcagtctgatctgcttggaattttgatggagtccaactccaacgagatccagggtgagggtaacaacaaggaggacggcatgtcaattgaggacgttatcgaagagtgcaaggtcttttacatcggtggacaggagactaccgccagactcttgatctggaccatgatcctgctctctagccacaccgagtggcaggaacgcgctcgaactgaggttttgaaggtctttggtaacaagaagcccgacttcgatggcctctctcggttgaaggttgtcaccatgatcctgaacgaggtcctgaggctctaccctcccgcgtccatgctgacccgaatcattcagaaggagactcgagtcggaaagcttaccctgcccgccggcgttatcttaatcatgcccattattctcatccaccgagatcatgacctctggggtgaggacgcgaacgagttcaagcctgagcgtttctccaagggcgtcagcaaggccgctaaggtgcagcccgccttctttccgttcggttggggtccccgaatctgtatgggtcaaaatttcgccatgattgaggccaagatggctctgtctttaatcctccagcgattttcgttcgagttgtcttcttcctacgttcatgccccaaccgttgtctttaccactcagccccagcacggtgcacacattgtgcttcggaaactgtag

SEQ ID NO: 321 - DNA, 1422 bp, Artificial Sequence
  Synthetic
atgtggactgtcgtgctgggtttagccaccctctttgttgcttactacattcattggatcaacaaatggcgggattctaagttcaatggcgtccttccccctggaacgatgggtctacccctcatcggtgaaaccatccagctgtccaggccgagtgactctctggacgttcaccccttcattcaaaagaaggtcgagcgatatggtcctatcttcaagacctgtcttgccgggcgacccgttgtcgtatccgcagatgctgagtttaacaactacattatgctccaggagggccgagccgtggagatgtggtacctggacaccctctccaagttcttcggtttggacactgagtggcttaaggccctgggactgatccacaagtacatccgatcaattaccctcaaccactttggtgccgaggctttaagagagcgattcctgcccttcatcgaagcgtcttccatggaggctcttcactcctggtctactcagccctccgtcgaggttaagaacgcctcggcccttatggttttccgtacctctgtcaacaagatgtttggcgaggacgcaaagaagctctccggtaacatccccggcaagttcaccaaactcctgggtggtttcctgtcgctccctctaaactttcccggtaccacttaccataagtgcctgaaggatatgaaggagatccagaagaagctccgagaggtcgttgacgaccgactggccaacgttggtccagatgtcgaggacttcctgggacaggcgcttaaggacaaggagtctgagaagttcattagcgaggagtttattatccagttgcttttctccatttccttcgccagtttcgaatctatttctaccactcttaccctcatcctcaagctgttggacgagcaccccgaggtggtcaaggagctcgaggccgaacacgaggctatccggaaggcccgagctgaccccgacggccccattacctgggaggagtacaagtccatgaccttcaccctgcaagtgatcaatgagactctgcgactaggctctgtaatgcctgctctcttacggaagacggtcaaggatctgcaagtcaaaggttacattatccccgagggctggaccattatgttagttaccgcctcccgacaccgagatcctaaggtctacaaggatccccacatcttcaacccatggcgatggaaggacctggactcaatcaccatccagaagaactttatgcccttcgggggtggcctccgacattgtgccggtgctgaatactccaaggtttatctttgcacattcctgcacatcctctgtacaaagtaccgatggactaaactgggaggtggtcgaatcgcccgagctcacattctgtcttttgaggacggtcttcatgtcaagttcacccctaaggagtag

SEQ ID NO: 322 - DNA, 951 bp, Artificial Sequence
  Synthetic
atggaccaaattgagcacatcacgatcaatacaaacggtattaaaatgcatatcgcatccgtgggaaccggcccggttgtcttgcttctgcacggcttcccagaactgtggtattcgtggcgacatcagctcctctacctgagctctgtgggataccgtgccattgctcccgatctcagaggttacggagacaccgattcccccgcgtcgcctacttcttacactgccttgcacattgtcggcgaccttgttggagctctggacgagctgggtatcgagaaggtgtttctggtcggccatgattggggagccatcattgcttggtatttctgtctgtttcggcctgaccgaattaaggcgctcgttaacctttctgtgcagttcatcccccgaaaccccgccattccttttatcgagggtttccggaccgcctttggagatgacttctacatgtgccgattccaggttccgggcgaagctgaagaggacttcgcatccatcgacaccgctcagttgtttaagacgagcctctgtaacagatcgtctgccccaccttgcctgcccaaagagattggcttccgagccatcccacctccggaaaatctcccctcctggcttacagaggaggatattaactactacgctgccaagttcaagcaaactggctttaccggagcgttgaactattacagagcttttgatctgacgtgggagctcacagcaccctggactggagcccagattcaggtcccggtcaagttcattgtgggtgactctgaccttacgtatcacttccctggagcaaaggagtacatccacaacggtggtttcaagaaagacgtgcctctcctggaagaggtcgtcgtggtgaaggatgcctgccatttcatcaaccaagaacgaccgcaggagatcaatgcacacattcacgattttatcaacaaattctag

SEQ ID NO: 323 - DNA, 2079 bp, Artificial Sequence
  Synthetic
atgacatccgcgttgtatgcatcggacctgttcaagcagcttaaatctatcatgggtactgattccctcagcgacgatgttgtcctggtgattgctacgacctctctggctctcgtggccggctttgtcgttcttttgtggaagaagaccactgctgacagatcgggagaactcaaaccgcttatgatccctaagagcctgatggccaaggacgaggacgatgatttggacctcggctccggaaagacccgggtgtctattttctttggtactcaaaccggaacggcagagggcttcgctaaggccctgtccgaggaaatcaaggctcgatacgagaaagccgctgttaaggtcattgacctcgatgactacgcagccgacgacgatcagtacgaagagaagctcaagaaggagacattggcgtttttctgtgtcgcgacgtacggtgatggcgagcccaccgacaacgccgcccgattttataaatggttcactgaggaaaatgagcgtgacattaagctgcaacagctggcttacggagtgttcgctcttggcaaccgacagtacgagcattttaacaaaatcggcatcgtgctggacgaggagctgtgcaagaagggagccaagcgtcttattgaggttggtctgggcgatgatgatcagtcgattgaagacgactttaacgcgtggaaagaatctctgtggtctgagctcgataagctcctgaaggacgaggacgacaaatcggtcgcaaccccatacacggctgttatccccgaatacagagtggtgactcacgatcctcgattcacaacacagaagtccatggagagcaatgtcgccaacggaaacacaactatcgatatccaccatccgtgtcgggtggacgtcgccgttcaaaaggagctgcacacccatgagtctgatcgatcctgcattcacttggaatttgacattagcagaaccggtatcacctatgagacaggtgaccacgttggcgtgtacgctgaaaaccatgtggaaattgtcgaggaggcgggaaagctgctcggtcattctttggaccttgtcttctccatccacgcggacaaggaggatggtagccccctggagagcgccgttcctcccccgttccccggaccatgcacgctgggcaccggacttgcacgatacgccgacctcctgaacccccctagaaagtctgctctcgtcgccctcgctgcttacgccactgaaccttccgaggctgagaagctgaaacacctcacctcgcccgatggaaaagatgagtattcgcagtggattgttgcttcccagcgatccctgcttgaggtcatggcagccttcccctccgccaagcctccgttgggagtcttctttgctgcaatcgccccccgactgcaaccccgttactattctatttcgtcttctccacggctcgcccctagccgagttcatgtgactagcgcccttgtgtacggcccaactcctacaggcagaatccacaagggtgtgtgttcgacctggatgaagaatgcggtgccggcggagaaatcgcacgagtgttccggcgcacccatcttcattcgggcttcgaacttcaagctgccttctaacccctctaccccgattgtgatggttggccccggaacgggtctggcgccatttcggggatttctgcaagagcgaatggccctcaaggaggacggcgaagaactcggatcctcgctgctctttttcggttgccgtaaccgacagatggacttcatttacgaggacgaactgaataactttgtggaccagggagttatctctgaactgattatggccttttcccgagagggtgcccagaaggagtacgtgcagcataaaatgatggaaaaggctgcccaggtgtgggaccttatcaaggaggaaggttatctgtacgtctgcggtgacgccaagggcatggcgcgtgatgtccaccgaacgctccataccatcgtccaggagcaggagggagtgtcttccagcgaggcagaggctattgtgaagaagctgcaaactgagggacgatatcttagagatgtctggtag

SEQ ID NO: 324 - protein, 473 aa, Artificial Sequence
  Synthetic
MWTVVLGLATLFVAYYIHWINKWRDSKFNGVLPPGTMGLPLIGETIQLSRPSDSLDVHPFIQKKVERYGPIFKTCLAGRPVVVSADAEFNNYIMLQEGRAVEMWYLDTLSKFFGLDTEWLKALGLIHKYIRSITLNHFGAEALRERFLPFIEASSMEALHSWSTQPSVEVKNASALMVFRTSVNKMFGEDAKKLSGNIPGKFTKLLGGFLSLPLNFPGTTYHKCLKDMKEIQKKLREVVDDRLANVGPDVEDFLGQALKDKESEKFISEEFIIQLLFSISFASFESISTTLTLILKLLDEHPEVVKELEAEHEAIRKARADPDGPITWEEYKSMTFTLQVINETLRLGSVMPALLRKTVKDLQVKGYIIPEGWTIMLVTASRHRDPKVYKDPHIFNPWRWKDLDSITIQKNFMPFGGGLRHCAGAEYSKVYLCTFLHILCTKYRWTKLGGGRIARAHILSFEDGLHVKFTPKE

SEQ ID NO: 325 - DNA, 1362 bp, Artificial Sequence
  Synthetic
atggacgcgcaacgcggacatacgactaccatcctgatgtttccgtggttggggtacggccaccttagtgcattcctcgaattagccaagagcttgtcgcgtaggaactttcatatttatttctgttccacatctgtcaatttagatgctataaaacccaaactaccatcatcttcaagttccgattctattcagcttgtagagttatgcttgccttcctcgccagaccaactacccccacacctgcatacaactaatgctctacctccacatctaatgcctaccctgcaccaggccttttcaatggcagctcaacattttgcagctatattacatactttagcaccgcacttgttaatctatgattcgttccagccttgggcgccacaattggccagctctcttaacattcctgctattaattttaataccacgggtgccagtgtgctaacaagaatgttacacgcgactcattacccatcttcaaagttcccaatctccgaatttgttttacatgattattggaaagcaatgtattcagcagctggtggtgctgttacaaaaaaggaccataaaataggagaaaccttggcaaactgtttacacgcttcttgctcggtaattctgatcaattcattcagagagttggaagaaaaatacatggattacttgtctgtcttactaaacaagaaagttgtgcccgtgggtccgcttgtttatgagccaaaccaagatggcgaagacgaaggttatagttcgataaagaattggctcgataaaaaggagccctcctcaactgtctttgtttccttcgggtccgaatattttccgtccaaagaagaaatggaagaaattgcccatggcttggaggctagcgaggtacactttatttgggtcgttagattcccacaaggagacaatacttctgcaattgaagatgcccttcctaagggttttcttgagcgagtgggcgaacgtggaatggtggttaagggttgggctcctcaggccaaaattttgaaacattggagcacaggcggtttcgtaagtcattgtggatggaatagtgttatggagagcatgatgtttggtgtacccataataggtgttccgatgcatttagatcaaccatttaatgcagggctcgcggaagaagcaggagtaggggtagaggctaaaagggaccctgatggtaagatacagagagatgaagtcgctaaactgatcaaagaagtggttgtcgaaaaaacgcgcgaagatgtcagaaagaaggctagggaaatgtctgaaattttacgttcgaaaggtgaggaaaagatggacgagatggttgcagccattagtctcttcttgaagatataa

SEQ ID NO: 326 - DNA, 1470 bp, Artificial Sequence
  Synthetic
atggttacgcaacagtccgccgctgagacttctgccacccagaccaacgaatatgacgtggtcatcgttggtgctggaattgcaggtcccgccctcgccgtcgctcttggcaatcagggtcggaaggtcctggttgtcgagcgagatctgtcggagcctgaccgtatcgttggggagttgctccagcccggtggtgtggccgcccttaagaccctgggcctcggctcttgcatcgaggatattgacgccattccatgtcagggttacaacgtcatctactccggagaggagtgtgtactgaaataccccaaggttcctcgagacatccagcaggactacaacgaattataccgatccggtaagtctgcggatatctccaacgaggctccccgaggtgtctcctttcaccatggccgcttcgtcatgaacctccgacgagcagctcgagacacccccaacgtgactctgctggaggccaccgttaccgaggtcgtaaagaacccctacactggtcacatcattggagtcaagaccttctctaagaccggtggtgccaagatttacaagcacttctttgctccgctcactgtggtctgcgatggcaccttctctaagttccgaaaggacttctccaccaacaagacctcggttcgaagtcactttgccggtcttatcttgaaggacgccgttctcccctccccccagcacggtcatgtcatcctgtctcccaactcatgtcctgttcttgtctaccaggtcggtgctcgagagactagaattttatgcgatatccaagggcccgtaccttccaacgccaccggtgctctaaaggagcacatggagaaaaatgtgatgccccacctaccaaagtctatccagccctcctttcaggccgcactcaaggaacagaccattcgagtcatgcctaactctttcctttccgcctcgaagaacgaccatcacggcctgatcctgctcggtgacgctctcaacatgcgacaccccctgactggtggaggaatgaccgttgcgcttaacgacgcccttctcctctcccgactgctgacaggtgtcaaccttgaggacacctacgctgtgtcttcagttatgagctcgcagttccactggcagcgaaagcatctggactccattgtcaacatcctctctatggccctgtactccctcttcgccgctgattccgactacctgcgaatccttcagctcggctgtttcaattatttcaagctgggcggtatttgcgtcgaccaccccgttatgctcctcgctggcgtgcttccccgaccgatgtacctctttacccacttcttcgtggtggctatctacggtggaatttgtaatatgcaggccaacggtatcgccaagctgcccgcctctctgctccaattcgtcgcctctcttgtcactgcttgtatcgttatttttccttacatctggtctgagctgacgtag

SEQ ID NO: 327 - DNA, 2229 bp, Artificial Sequence
  Synthetic
atgggaatccacgaaagtgtgtcgaaacagtttgcgaaaaacggacattccaagtaccgcagcgaccgatacggcttacctaagacggatctgcgacgatggacgttccacgcgtccgatctgggggcgcaatggtggaagtatgacgataccacaccgctggaagagctggaaaagagggctaccgactacgtcaaatactcgctggagctgccgggatacgcgcccgtgactctggactccaagcccgtgaaaaatgcctacgaagcggctctcaaaaactggcatctgtttgcgtcgctgcaagaccccgactccggcgcatggcagtcggaatacgacggaccgcagttcatgtcgatcggttatgtgacggcgtgctactttggcggcaacgagatccccacgccggtcaaaaccgaaatgatcagatacattgtcaacacagcccacccagttgacggaggctggggccttcacaaagaagacaagagcacctgtttcggtaccagcatcaactacgtggtcctgcgactactgggcctgtcacgggatcatccggtctgcgtcaaggcgcgcaaaacgctgctcaccaagtttggcggcgccatcaacaacccccattggggcaagacctggctgtcgattctcaatctctacaaatgggagggtgtgaatccggcccctggcgagctctggctgttgccctactttgttcctgttcatccgggccgatggtgggtccacacccggtggatctaccttgccatgggctatctggaggctgcggaggcccaatgcgaactcactccgttgctggaggagctccgagacgaaatctacaaaaagccctactcggagattgatttctccaaacattgcaactccatctccggagtcgacctctactatccccacaccggccttttgaagtttggcaacgcgcttctcagacgataccgcaagttcagaccgcagtggatcaaagaaaaggtcaaggaggaaatttacaacttgtgccttcgagaggtttccaacacacgacacttgtgtctcgctcccgtcaacaatgccatgacctccattgtcatgtatctccatgaggggcccgattcggcgaattacaaaaagattgcggcccgatggcccgaatttctgtctctgaatccgtcgggaatgtttatgaacggcaccaacggtctgcaggtctgggatactgcgtttgccgtgcaatacgcgtgtgtttgtggctttgccgaacttccccagtaccagaagacgatccgagcggcgtttgattttctcgatcggtcccagatcaacgagccgacggaggaaaattcctatcgagacgaccgcgtcggaggatggccctttagtaccaagacccaggggtatccagtctccgactgtactgccgaggctctcaaggccatcatcatggtccagaatacgcctggatacgaggatcagaagaaacaagtgtctgacaagcggaaacacactgccatcgatctacttttgggaatgcagaacgtgggctcgtttgaaccgggctctttcgcctcctatgagcctatccgggcgtcgtccatgctggagaagatcaatccggccgaggtgtttggaaacatcatggtggagtatccgtacgtggaatgcactgattctgttgttctgggtctgtcctactttcgaaagtaccacgattaccgcaacgaagacgtggaccgagccatctctgctgccattggattcattattcgagagcagcagcctgacggcggcttctttggctcctggggcgtgtgctactgctacgctcacatgtttgccatggaggctctggagacgcagaatctcaactataacaactgttccacggttcaaaaggcgtgcgactttctggcgggctaccaggaagcagatggaggctgggccgaggactttaagtcgtgcgagactcagatgtacgtgcacggaccccattcgctggtcgtgcctactgccatggccctgttgagtttgatgagtggtcggtatccccaggaggacaagattcatgctgcggcccggtttctcatgagcaagcagatgagcaacggtgagtggctcaaggaggagatggagggggtgtttaaccatacttgtgccattgagtatcccaactaccggttttattttgtcatgaaggctttggggttgtatttcaagggatattgccagtag

SEQ ID NO: 328 - protein, 489 aa, Yarrowia lipolytica
MVTQQSAAETSATQTNEYDVVIVGAGIAGPALAVALGNQGRKVLVVERDLSEPDRIVGELLQPGGVAALKTLGLGSCIEDIDAIPCQGYNVIYSGEECVLKYPKVPRDIQQDYNELYRSGKSADISNEAPRGVSFHHGRFVMNLRRAARDTPNVTLLEATVTEVVKNPYTGHIIGVKTFSKTGGAKIYKHFFAPLTVVCDGTFSKFRKDFSTNKTSVRSHFAGLILKDAVLPSPQHGHVILSPNSCPVLVYQVGARETRILCDIQGPVPSNATGALKEHMEKNVMPHLPKSIQPSFQAALKEQTIRVMPNSFLSASKNDHHGLILLGDALNMRHPLTGGGMTVALNDALLLSRLLTGVNLEDTYAVSSVMSSQFHWQRKHLDSIVNILSMALYSLFAADSDYLRILQLGCFNYFKLGGICVDHPVMLLAGVLPRPMYLFTHFFVVAIYGGICNMQANGIAKLPASLLQFVASLVTACIVIFPYIWSELT

SEQ ID NO: 329 - protein, 742 aa, Artificial Sequence
  Synthetic
MGIHESVSKQFAKNGHSKYRSDRYGLPKTDLRRWTFHASDLGAQWWKYDDTTPLEELEKRATDYVKYSLELPGYAPVTLDSKPVKNAYEAALKNWHLFASLQDPDSGAWQSEYDGPQFMSIGYVTACYFGGNEIPTPVKTEMIRYIVNTAHPVDGGWGLHKEDKSTCFGTSINYVVLRLLGLSRDHPVCVKARKTLLTKFGGAINNPHWGKTWLSILNLYKWEGVNPAPGELWLLPYFVPVHPGRWWVHTRWIYLAMGYLEAAEAQCELTPLLEELRDEIYKKPYSEIDFSKHCNSISGVDLYYPHTGLLKFGNALLRRYRKFRPQWIKEKVKEEIYNLCLREVSNTRHLCLAPVNNAMTSIVMYLHEGPDSANYKKIAARWPEFLSLNPSGMFMNGTNGLQVWDTAFAVQYACVCGFAELPQYQKTIRAAFDFLDRSQINEPTEENSYRDDRVGGWPFSTKTQGYPVSDCTAEALKAIIMVQNTPGYEDQKKQVSDKRKHTAIDLLLGMQNVGSFEPGSFASYEPIRASSMLEKINPAEVFGNIMVEYPYVECTDSVVLGLSYFRKYHDYRNEDVDRAISAAIGFIIREQQPDGGFFGSWGVCYCYAHMFAMEALETQNLNYNNCSTVQKACDFLAGYQEADGGWAEDFKSCETQMYVHGPHSLVVPTAMALLSLMSGRYPQEDKIHAAARFLMSKQMSNGEWLKEEMEGVFNHTCAIEYPNYRFYFVMKALGLYFKGYCQ

SEQ ID NO: 330 - DNA, 630 bp, Artificial Sequence
  Synthetic
atggagctgtactggaaggccatggagcagatcgcctggtacactggtctgtcccccaccgccttcttcaccattctggcctccatgatctttgtgttccagatggtcagctccatgttcgtttctcccgaggagttcaacaagcctcccaccgtccccgtcagctcttccaaccccgccaactccaacctcttcgtcaacgactctgtggctgatgcttcccaggccgtccagattggtcagctcaccgagcagcagctccgtgcttatgacggcagtgaccccaacaagcctcttctcatggccatcaagggccagatctacgacgtttcttctggacgaatgttctacggaccgggctctccttacgctatgtttgccggcaaggatgcttctcgagctctggctctgctgtccttcaagcccgaggacatcaccggtaacatcgagggtttgtccgaggaggagctcgttatccttcaggactgggagtacaagttcatggagaagtacgtcaaggttggtgagcttgtccttgagggaggaggagaagggatgaacgagcactccgagaacggtcaccgaaactttgagattgaccaggaggaggagcgaatcgaggctcgatag

SEQ ID NO: 331 - DNA, 843 bp, Artificial Sequence
  Synthetic
atggctctgcaagtctgggagactctcaaggaggccattgtcgcttacaccggtctgtctcccgctaccttcttcactgtgctcgctcttggtttggccgtctactacgtcatttcgggcttcttcggcacctcggactacggctctcactctcgagatttcggtgagcagatgcagcccctgcctcctcccgtccaggttggtgagatctctgaggaggagctcaagcagtacgacggcagtgactccaagaagcctcttctcatggccatcaagggccagatttacgatgtcagccagagccgaatgttctacggacccggtggcccttacgctctgtttgccggcaaggatgcttctcgagctctggccaaaatgtcatttgaagagaaggacctgactggtgacatttccggactcggcccattcgagcttgaggccctccaggattgggaatacaagttcatgtccaagtacgttaaggtcggcaccgttgagaagcccgtcagcgagacagacgctgctcccgccggtgagtctgctgagtccaccaacgccgaggtgtccaagcccgctgaggacggtccttccgagtcccaggccgacaaggctgaggagacagtcgctgccaagcagaagaaggagaagaagaagggccgacgacgagtcgagggtgttctcatggagatccgaggcgaggccgttggtggccgaaagggcgagggcatgtcgagggagattggccgaggtggtggtggtgccgacgacggcaacctcaagggtggtggtatcgaccacggtgagcgagaacgagagcgagaacgagagtccggcatgtcttag

SEQ ID NO: 332 - DNA, 2229 bp, Artificial Sequence
  Synthetic
atgggaatccacgaaagtgtgtcgaaacagtttgcgaaaaacggacattccaagtaccgcagcgaccgatacggcttacctaagacggatctgcgacgatggacgttccacgcgtccgatctgggggcgcaatggtgggagtatgacgataccacaccgctggaagagctggaaaagagggctaccgactacgtcaaatactcgctggagctgccgggatacgcgcccgtgactctggactccaagcccgtgaaaaatgcctacgaagcggctatcaaaaactggcatctgtttgcgtcgctgcaagaccccgactccggcgcatggcagtcggaatacgacggaccgcagttcatgtcgatcggttatgtgacggcgtgctactttggcggcaacgagatccccacgccggtcaaaaccgaaatgatcagatacattgtcaacacagcccacccagttgacggaggctggggccttcacaaagaagacaagagcacctgtttcggtaccagcatcaactacgtggtcctgcgactactgggcctgtcacgggatcatccggtctgcgtcaaggcgcgcaaaacgctgctcaccaagtttggcggcgccatcaacaacccccattggggcaagacctggctgtcgattctcaatctctacaaatgggagggtgtgaatccggcccctggcgagctctggctgttgccctactttgttcctgttcatccgggtcgatggtgggtccatacccggtggatctaccttgccatgggctatctggaggctgcggaggcccaatgcgaactcactccgttgctggaggagctccgagacgaaatctacaaaaagccctactcggagattgatttctccaaacattgcaactccatctccggagtcgacctctactatccccacaccggccttttgaagtttggcaacgcgcttctccgacgataccgcaagttcagaccgcagtggatcaaagaaaaggtcaaggaggaaatttacaacttgtgccttcgagaggtttccaacacacgacacttgtgtctcgctcccgtcaacaatgccatgtcctccattgtcatgtatctccatgaggggcccgatccggcgaattacaaaaagattgcggcccgatggcccgaatttctgtctctgaatccgtcgggaatgtttatgaacggcaccaacggtctgcaggtctgggatactgcgtttgccgtgcaatacgcgtgtgtttgtggctttgccgaacttccccagtaccagaagacgatccgagcggcgtttgattttctcgatcggtcccagatcaacgagccgatggaggaaaattcctatcgagacgaccgcgtcggaggatggccctttagtaccaagacccaggggtatccagtctccgactgtactgccgaggctctcaaggccatcatcatggtccagaatacacctggatacgaggatctgaagaaacaagtgtctgacaagcggaaacacactgccatcgatctacttttgggaatgcagaacgtgggctcgtttgaaccgggctctttcgcctcctatgagcctatccgggcgtcgtccatgctggagaagatcaatccggccgaggtgtttggaaacatcatggtggagtatccgtacgtggaatgcactgattctgttgttctgggtctgtcctactttcgaaagtaccacgattaccgcaacgaagacgtggacccagccatctctgctgccattggatacattattcgagagcagcagcctgacggcggcttctttggctcctggggcgtgtgctactgctacgctcacatgtttgccatggaggctctggagacgcagaatctcaactataacaactgttccacggttcaaaaggcgtgcgactttctggcgggctaccaggaagcagatggaggctgggccgaggactttaagtcgtgcgagactcagatgtacgtgcgcggaccccattcgctggtcgtgcctactgccatggccctgttgagtttgatgagtggtcggtatccccaggaggacaagattcatgctgcggcccggtttctcatgagcaagcagatgagcaacggtgagtggctcaaggaggagatggagggggtgtttaaccatacttgtgccattgagtatcccaactaccggttttattttgtcatgaaggctttggggttgtatttcaagggatattgccagtag

SEQ ID NO: 333 - DNA, 2106 bp, Artificial Sequence
  Synthetic
atgaaggtttcccctttcgagtttatgtctgctattatcaaaggacggatggatccctcaaattccagcttcgaatccactggtgaggtggcctctgtcatcttcgagaacagggagctggtcgccattcttaccaccagtatcgcagtaatgattggttgttttgttgtcttgatgtggcgacgagctggctctcgaaaggttaagaacgtcgagctgcccaagccactcatcgtccacgagcccgagcctgaagtggaggacggtaagaagaaggtcagcatcttcttcggcacccagacgggtaccgccgaggggttcgccaaggctttagccgacgaggccaaggcgcgatacgagaaggctacttttcgagttgtggacctggatgactatgccgctgacgatgaccaatacgaggagaagctcaagaacgaatccttcgcagtttttctccttgcgacctacggtgacggagagcccacagacaacgctgcccgattctacaagtggttcgctgagggtaaagagcgaggtgagtggctgcaaaacctccattacgccgtctttggccttggtaaccgacagtacgagcacttcaacaagatcgccaaggttgccgatgagctgcttgaggcccagggcggtaatcgactggttaaggttggcctcggagatgacgaccagtgcattgaggacgacttctcggcttggcgcgagtccctgtggcccgagttggatatgctacttagagatgaagacgacgccaccaccgtcactaccccctacacagctgccgtcctggagtaccgtgtcgtgttccacgactctgccgatgttgctgccgaggataagtcctggatcaacgccaacggtcacgctgtccatgacgctcagcacccgttccgatctaacgtagtcgttcgaaaggagctacacacctccgcctctgaccgatcctgttctcacctggagtttaacatttccggttccgccctcaactacgagactggtgaccatgtcggcgtctactgcgaaaacctcaccgagactgtcgacgaggccctcaatttgctgggtctgtcccctgagacatatttctccatctacaccgacaacgaggacggtaccccccttggaggctcttctctcccccctccctttcccagctgtaccctgcgaaccgcgctgacccgatacgccgacttgctcaactcgcccaaaaagtctgctcttctcgctctggccgcacacgcgtccaaccccgtcgaggccgaccgactccgttacctggccagtccggctggaaaggatgaatacgcccagtccgttattggttcgcagaagtctctcctagaggtgatggctgagttcccctccgccaagccccctcttggtgtattctttgctgccgtcgcccctagactccagccacgattctactctatcagcagttccccccgaatggctccctctcggattcacgttacctgcgccctcgtgtacgacaagatgcccaccggtcgaatccacaagggagtgtgttccacttggatgaagaactctgtccccatggagaagtcccatgagtgctcctgggctcctatcttcgtccgacagtcgaacttcaagcttcccgcggagtctaaggttcccatcattatggtgggtcctggcaccggtctggctcccttccgtggatttctgcaagagcgactcgcccttaaggaatctggcgttgagctgggtccttctattctgtttttcggttgtcgaaaccgacgaatggattatatctacgaggacgagttgaacaacttcgtcgagactggagccctttccgagcttgtcattgccttcagccgagagggtcccaccaaagagtacgtgcagcacaagatggccgagaaggcatccgatatctggaatctgatctctgaaggtgcttacctctacgtttgtggggacgccaagggtatggccaaggacgtccaccgaaccttgcacaccatcatgcaggagcagggctccttagattccagtaaggctgagtctatggttaagaacctccagatgaacggtcgctacctgcgagatgtgtggtag

SEQ ID NO: 334 - DNA, 1563 bp, Artificial Sequence
  Synthetic
atggagatgtcgagctccgtggccgcaacgatttccatctggatggtcgttgtgtgtatcgtcggcgttggttggagagtggtcaattgggtctggctgcggccaaaaaagttggaaaagcgtcttcgagagcagggactcgcgggaaactcttaccgactgctcttcggcgacctgaaggagcgagccgctatggaagagcaagcaaactctaaaccgattaacttttcgcacgatatcggtccccgtgttttcccttctatgtataagacaattcagaactacggaaagaactcctacatgtggcttggcccttacccccgagtgcatatcatggacccccagcagctcaagactgtgtttaccctggtctatgatattcaaaagcccaatttgaacccgctgattaagttcctcctggacggaatcgtgacccacgaaggcgagaaatgggccaagcatagaaaaattatcaatcctgctttccacctggagaagctgaaggacatgattccagcttttttccacagctgcaacgagatcgttaacgagtgggagcggttgatctctaaggaaggttcgtgcgagttggatgtcatgccctaccttcagaacctcgccgccgacgctatttcccgaaccgcctttggatcttcgtacgaggaaggcaagatgatctttcagctccttaaagagctgacagacctggttgtgaaggttgcattcggtgtgtacattcctggctggcgatttttgccgactaagagcaacaacaagatgaaggagatcaatcgaaagatcaaatccctgctccttggaatcattaataagagacaaaaagcgatggaagagggtgaagctggccagtcggatctgcttggtatcctgatggagtctaacagcaacgaaattcagggtgagggaaacaacaaggaggacggcatgtccatcgaagatgtgattgaggaatgtaaggtcttctacattggtggacaggagactaccgccagactcctgatttggacaatgatccttctcagctctcataccgagtggcaggaacgggctcgaaccgaggtcttgaaagttttcggcaataagaagcctgactttgacggcttgtcgcgtcttaaggtggtgacgatgatcctcaacgaggtcctccgactgtatccccccgcgtccatgctgactagaattatccagaaggaaacccgtgtcggtaagctcaccctcccagcgggagttattttgatcatgcccatcatcctgattcatcgggatcacgacctgtggggagaggacgccaacgagttcaagcctgagcgattctccaagggcgtttctaaagctgcgaaggtccaaccggccttctttcccttcggctggggacctcgaatttgtatgggccagaatttcgcaatgatcgaggccaaaatggctttgtcgctcatcctgcaacggttttcctttgaactgtcctcttcttatgtgcacgcccctacggtggtctttactacacagccgcaacacggcgcacacatcgtcttgcgaaaactgtag

SEQ ID NO: 335 - DNA, 1563 bp, Artificial Sequence
  Synthetic
atggaaatgtcttcgtccgtcgcggccacgattagcatctggatggttgtggtgtgtatcgtcggcgtgggttggagagttgtgaactgggtctggcttcgacctaaaaagctggagaagcgtttgcgagagcagggactcgctggcaattcttaccggctgctgtttggagacttgaaggagcgagcagccatggaggaacaagctaactccaagcccattaacttctcgcatgatatcggtccgagagttttcccaagcatgtataagaccattcagaattacggaaagaactcgtacatgtggcttggcccctatcctcgagtccacattatggacccgcagcagctcaaaactgtgtttacactggtctacgatatccagaagcccaaccttaaccccctcatcaagttcctgctggacggcatcgtgacccacgagggtgaaaaatgggccaagcatcggaagattattaatcctgcttttcacctcgagaagctgaaggacatgatcccagcattctttcactcttgcaacgaaatcgttaacgagtgggagcgactcatttccaaagagggttcctgcgagctggacgtcatgccctacctgcaaaacctcgccgctgatgcgatctctcggactgccttcggatcttcctacgaagagggaaagatgatcttccagctcttgaaggagcttaccgatttggttgtgaaggtcgcttttggtgtgtacattcctggctggagattcctgccaacaaaatcgaataacaagatgaaggagattaaccgaaagattaaatcgttgctcctgggtatcattaataaacgtcagaaggccatggaagagggcgaggccggccagtccgacctgctcggaatccttatggaatccaactctaacgaaattcaaggagagggaaacaacaaggaggacggcatgagcattgaagatgtgatcgaggaatgtaaggtcttctacatcggaggccaagagactacggcgcgactcctgatttggaccatgatcctgttgtcttctcataccgagtggcaggagcgagctcgtacagaagtgttgaaggtgttcggcaacaaaaaacccgactttgacggtctgtcgcgactgaaggttgtgactatgatcctcaatgaggttctcagactgtaccctcccgcctctatgcttacccgaattattcagaaggagacacgtgtgggtaagcttacccttcccgcaggcgtcatcctcatcatgcctattatcctgatccaccgggaccacgatctctggggcgaggatgccaacgagtttaagcccgagagattttctaagggagtttctaaggctgccaaagtccagcccgcattcttccccttcggttggggacctcgaatctgtatgggacagaactttgcgatgattgaagcaaagatggctctcagcttgattcttcagagatttagctttgagctgtcctcgtcttatgtccatgcaccgactgttgtgttcaccacccaaccacagcatggcgcccacattgttctgcggaaattgtag

SEQ ID NO: 336 - protein, 742 aa, Artificial Sequence
  Synthetic
MGIHESVSKQFAKNGHSKYRSDRYGLPKTDLRRWTFHASDLGAQWWEYDDTTPLEELEKRATDYVKYSLELPGYAPVTLDSKPVKNAYEAAIKNWHLFASLQDPDSGAWQSEYDGPQFMSIGYVTACYFGGNEIPTPVKTEMIRYIVNTAHPVDGGWGLHKEDKSTCFGTSINYVVLRLLGLSRDHPVCVKARKTLLTKFGGAINNPHWGKTWLSILNLYKWEGVNPAPGELWLLPYFVPVHPGRWWVHTRWIYLAMGYLEAAEAQCELTPLLEELRDEIYKKPYSEIDFSKHCNSISGVDLYYPHTGLLKFGNALLRRYRKFRPQWIKEKVKEEIYNLCLREVSNTRHLCLAPVNNAMSSIVMYLHEGPDPANYKKIAARWPEFLSLNPSGMFMNGTNGLQVWDTAFAVQYACVCGFAELPQYQKTIRAAFDFLDRSQINEPMEENSYRDDRVGGWPFSTKTQGYPVSDCTAEALKAIIMVQNTPGYEDLKKQVSDKRKHTAIDLLLGMQNVGSFEPGSFASYEPIRASSMLEKINPAEVFGNIMVEYPYVECTDSVVLGLSYFRKYHDYRNEDVDPAISAAIGYIIREQQPDGGFFGSWGVCYCYAHMFAMEALETQNLNYNNCSTVQKACDFLAGYQEADGGWAEDFKSCETQMYVRGPHSLVVPTAMALLSLMSGRYPQEDKIHAAARFLMSKQMSNGEWLKEEMEGVFNHTCAIEYPNYRFYFVMKALGLYFKGYCQ

SEQ ID NO: 337 - protein, 742 aa, Yarrowia lipolytica
MGIHESVSKQFAKNGHSKYRSDRYGLPKTDLRRWTFHASDLGAQWWKYDDTTPLEELEKRATDYVKYSLELPGYAPVTLDSKPVKNAYEAALKNWHLFASLQDPDSGAWQSEYDGPQFMSIGYVTACYFGGNEIPTPVKTEMIRYIVNTAHPVDGGWGLHKEDKSTCFGTSINYVVLRLLGLSRDHPVCVKARKTLLTKFGGAINNPHWGKTWLSILNLYKWEGVNPAPGELWLLPYFVPVHPGRWWVHTRWIYLAMGYLEAAEAQCELTPLLEELRDEIYKKPYSEIDFSKHCNSISGVDLYYPHTGLLKFGNALLRRYRKFRPQWIKEKVKEEIYNLCLREVSNTRHLCLAPVNNAMTSIVMYLHEGPDSANYKKIAARWPEFLSLNPSGMFMNGTNGLQVWDTAFAVQYACVCGFAELPQYQKTIRAAFDFLDRSQINEPTEENSYRDDRVGGWPFSTKTQGYPVSDCTAEALKAIIMVQNTPGYEDLKKQVSDKRKHTAIDLLLGMQNVGSFEPGSFASYEPIRASSMLEKINPAEVFGNIMVEYPYVECTDSVVLGLSYFRKYHDYRNEDVDRAISAAIGYIIREQQPDGGFFGSWGVCYCYAHMFAMEALETQNLNYNNCSTVQKACDFLAGYQEADGGWAEDFKSCETQMYVRGPHSLVVPTAMALLSLMSGRYPQEDKIHAAARFLMSKQMSNGEWLKEEMEGVFNHTCAIEYPNYRFYFVMKALGLYFKGYCQ

SEQ ID NO: 338 - DNA, 2229 bp, Artificial Sequence
  Synthetic
atgggaatccacgaaagtgtgtcgaaacagtttgcgaaaaacggacattccaagtaccgcagcgaccgatacggcttacctaagacggatctgcgacgatggacgttccacgcgtccgatctgggggcgcaatggtggaagtatgacgataccacaccgctggaagagctggaaaagagggctaccgactacgtcaaatactcgctggagctgccgggatacgcgcccgtgactctggactccaagcccgtgaaaaatgcctacgaagcggctctcaaaaactggcatctgtttgcgtcgctgcaagaccccgactccggcgcatggcagtcggaatacgacggaccgcagttcatgtcgatcggttatgtgacggcgtgctactttggcggcaacgagatccccacgccggtcaaaaccgaaatgatcagatacattgtcaacacagcccacccagttgacggaggctggggccttcacaaagaagacaagagcacctgtttcggtaccagcatcaactacgtggtcctgcgactactgggcctgtcacgggatcatccggtctgcgtcaaggcgcgcaaaacgctgctcaccaagtttggcggcgccatcaacaacccccattggggcaagacctggctgtcgattctcaatctctacaaatgggagggtgtgaatccggcccctggcgagctctggctgttgccctactttgttcctgttcatccgggccgatggtgggtccatacccggtggatctaccttgccatgggctatctggaggctgcggaggcccaatgcgaactcactccgttgctggaggagctccgagacgaaatctacaaaaagccctactcggagattgatttctccaaacattgcaactccatctccggagtcgacctctactatccccacaccggccttttgaagtttggcaacgcgcttctccgacgataccgcaagttcagaccgcagtggatcaaagaaaaggtcaaggaggaaatttacaacttgtgccttcgagaggtttccaacacacgacacttgtgtctcgctcccgtcaacaatgccatgacctccattgtcatgtatctccatgaggggcccgattcggcgaattacaaaaagattgcggcccgatggcccgaatttctgtctctgaatccgtcgggaatgtttatgaacggcaccaacggtctgcaggtctgggatactgcgtttgccgtgcaatacgcgtgtgtttgtggctttgccgaacttccccagtaccagaagacgatccgagcggcgtttgattttctcgatcggtcccagatcaacgagccgacggaggaaaattcctatcgagacgaccgcgtcggaggatggccctttagtaccaagacccaggggtatccagtctccgactgtactgccgaggctctcaaggccatcatcatggtccagaatacgcctggatacgaggatctgaagaaacaagtgtctgacaagcggaaacacactgccatcgatctacttttgggaatgcagaacgtgggctcgtttgaaccgggctctttcgcctcctatgagcctatccgggcgtcgtccatgctggagaagatcaatccggccgaggtgtttggaaacatcatggtggagtatccgtacgtggaatgcactgattctgttgttctgggtctgtcctactttcgaaagtaccacgattaccgcaacgaagacgtggaccgagccatctctgctgccattggatacattattcgagagcagcagcctgacggcggcttctttggctcctggggcgtgtgctactgctacgctcacatgtttgccatggaggctctggagacgcagaatctcaactataacaactgttccacggttcaaaaggcgtgcgactttctggcgggctaccaggaagcagatggaggctgggccgaggactttaagtcgtgcgagactcagatgtacgtgcgcggaccccattcgctggtcgtgcctactgccatggccctgttgagtttgatgagtggtcggtatccccaggaggacaagattcatgctgcggcccggtttctcatgagcaagcagatgagcaacggtgagtggctcaaggaggagatggagggggtgtttaaccatacttgtgccattgagtatcccaactaccggttttattttgtcatgaaggctttggggttgtatttcaagggatattgccagtga

1. A host cell that comprises a heterologous polynucleotide encoding a cytochrome b5 (CB5), wherein the host cell is capable of producing more mogrol than a control host cell that 5 does not comprise the heterologous polynucleotide, and wherein the CB5 comprises:
a) the amino acid sequence
(SEQ ID NO: 47)
YTGLSP;
b) the amino acid sequence
(SEQ ID NO: 48)
KPLLMAIKGQIYDVS;
c) the amino acid sequence
(SEQ ID NO: 49)
LQDWEYKFM;
and/or
d) the amino acid sequence
(SEQ ID NO: 53)
X₁X₂X₃EX₄GX₅X₆X₇X₈X₉X₁₀D,
wherein:
(i) X₁ is the amino acid K or E;
(ii) X₂ is the amino acid P or H;
(iii) X₃ is the amino acid A or S;
(iv) X₄ is the amino acid D or N;
(v) X₅ is the amino acid P or H;
(vi) X₆ is the amino acid S or R;
(vii) X₇ is the amino acid E or N;
(viii) X₈ is the amino acid S or F;
(ix) X₉ is the amino acid Q or E; and/or
(x) X₁₀ is the amino acid A or I.

2. The host cell of claim 1, wherein the CB5 comprises:
a) the amino acid sequence
X₁X₂X₃X₄X₅X₆X₇EX₈IX₉X₁₀YTGLSPX₁₁X₁₂FFTX₁₃LAX₁₄X₁₅X₁₆X₁₇VX₁₈X₁₉X₂₀X₂₁SX₂₂X₂₃FX₂₄X₂₅X₂₆X₂₇X₂₈X₂₉X₃₀X₃₁ (SEQ ID NO: 50), wherein:
(i) X₁ is the amino acid E or Q;
(ii) X₂ is the amino acid L or V;
(iii) X₃ is the amino acid Y or W;
(iv) X₄ is the amino acid W or E;
(v) X₅ is the amino acid K or T;
(vi) X₆ is the amino acid A or L;
(vii) X₇ is the amino acid M or K;
(viii) X₈ is the amino acid Q or A;
(ix) X₉ is the amino acid A or V;
(x) X₁₀ is the amino acid W or A;
(xi) X₁₁ is the amino acid T or A;
(xii) X₁₂ is the amino acid A or T;
(xiii) X₁₃ is the amino acid I or V;
(xiv) X₁₄ is the amino acid S or L;
(xv) X₁₅ is the amino acid M or G;
(xvi) X₁₆ is the amino acid I or L;
(xvii) X₁₇ is the amino acid F or A;
(xviii) X₁₈ is the amino acid F or Y;
(xix) X₁₉ is the amino acid Q or Y;
(xx) X₂₀ is the amino acid M or V;
(xxi) X₂₁ is the amino acid V or I;
(xxii) X₂₂ is the amino acid S or G;
(xxiii) X₂₃ is the amino acid M or F;
(xxiv) X₂₄ is the amino acid V or G;
(xxv) X₂₅ is the amino acid S or T;
(xxvi) X₂₆ is the amino acid P or S;
(xxvii) X_{2 7} is the amino acid E or D;
(xxviii) X₂₈ is the amino acid E or Y;
(xxix) X₂₉ is the amino acid F or G;
(xxx) X₃₀ is the amino acid N or S; and/or
(xxi) X₃₁ is the amino acid K or H;
b) the amino acid sequence
X₁VQX₂GX₃X₄X₅EX₆X₇LX₈X₉YDGSDX₁₀X₁₁KPLLMAIKGQIYDVSX₁₂X₁₃RMF (SEQ ID NO: 51), wherein:
(i) X₁ is the amino acid P or A;
(ii) X₂ is the amino acid V or I;
(iii) X₃ is the amino acid E or Q;
(iv) X₄ is the amino acid I or L;
(v) X₅ is the amino acid S or T;
(vi) X₆ is the amino acid E or Q;
(vii) X₇ is the amino acid E or Q;
(viii) X₈ is the amino acid K or R;
(ix) X₉ is the amino acid Q or A;
(x) X₁₀ is the amino acid S or P;
(xi) X₁₁ is the amino acid K or N;
(xii) X₁₂ is the amino acid Q or S; and/or (xiii) X₁₃ is the amino acid S or G; and/or
c) the amino acid sequence
LAX₁X₂SFX₃X₄X₅DX₆TGX₇IX₈GLX₉X₁₀X₁₁ELX₁₂X₁₃LQDWEYKFMX₁₄KYVKVGX₁₅X₁₆ (SEQ ID NO: 52), wherein:
(i) X₁ is the amino acid K or L;
(ii) X₂ is the amino acid M or L;
(iii) X₃ is the amino acid E or K;
(iv) X₄ is the amino acid E or P;
(v) X₅ is the amino acid K or E;
(vi) X₆ is the amino acid L or I;
(vii) X₇ is the amino acid D or N;
(viii) X₈ is the amino acid S or E;
(ix) X₉ is the amino acid G or S;
(x) X₁₀ is the amino acid P or E;
(xi) X₁₁ is the amino acid F or E;
(xii) X₁₂ is the amino acid E or V;
(xiii) X₁₃ is the amino acid A or I;
(xiv) X₁₄ is the amino acid S or E;
(xv) X₁₅ is the amino acid T or E; and/or
(xvi) X₁₆ is the amino acid V or L.

3. The host cell of claim 1 or 2, wherein the CB5 comprises one or more of the following amino acid sequences:
a)
(SEQ ID NO: 58)
QVWETLKEAIVAYTGLSPATFFTVLA
LGLAVYYVISGFFGTSDYGSH
or
(SEQ ID NO: 59)
ELYWKAMEQIAWYTGLSPTAFFTILA
SMIFVFQMVSSMFVSPEEFNK;
b)
(SEQ ID NO: 60)
PVQVGEISEEELKQYDGSDSKKPLLM
AIKGQIYDVSQSRMF
or
(SEQ ID NO: 61)
AVQIGQLTEQQLRAYDGSDPNKPLLM
AIKGQIYDVSSGRMF;
c)
(SEQ ID NO: 62)
LAKMSFEEKDLTGDISGLGPFELEA
LQDWEYKFMSKYVKVGTV
or
(SEQ ID NO: 63)
LALLSFKPEDITGNIEGLSEEELVIL
QDWEYKFMEKYVKVGEL;
and
d)
(SEQ ID NO: 64)
KPAEDGPSESQAD
or
(SEQ ID NO: 65)
EHSENGHRNFEID

4. The host cell of claim 1, wherein the CB5 comprises:
a) the amino acid sequence YTGLSP (SEQ ID NO: 47) at residues corresponding to positions 16-21 in SEQ ID NO: 1;
b) the amino acid sequence KPLLMAIKGQIYDVS (SEQ ID NO: 48) at residues corresponding to positions 85-99 in SEQ ID NO: 1; and/or
c) the amino acid sequence LQDWEYKFM (SEQ ID NO: 49) at residues corresponding to positions 148-156 in SEQ ID NO: 1

5. The host cell of claim 1 or 3, wherein the CB5 comprises the amino acid sequence X₁X₂X₃EX₄GX₅X₆X₇X₈X₉X₁₀D (SEQ ID NO: 53) at residues corresponding to positions 190-202 of SEQ ID NO: 1.

6. The host cell of claim 2 or claim 3, wherein the CB5 comprises:
a) the amino acid sequence
X₁X₂X₃X₄X₅X₆X₇EX₈IX₉X₁₀YTGLSPX₁₁X₁₂FFTX₁₃LAX₁₄X₁₅X₁₆X₁₇VX₁₈X₁₉X₂₀X₂₁SX₂₂X₂₃FX₂₄X₂₅X₂₆X₂₇X₂₈X₂₉X₃₀X₃₁(SEQ ID NO: 50) at residues corresponding to positions 4-50 of SEQ ID NO: 1;
b) the amino acid sequence
X₁VQX₂GX₃X₄X₅EX₆X₇LX₈X₉YDGSDX₁₀X₁₁KPLLMAIKGQIYDVSX₁₂X₁₃RMF (SEQ ID NO: 51) at residues corresponding to positions 64-104 of SEQ ID NO: 1; and/or
c) the amino acid sequence
LAX₁X₂SFX₃X₄X₅DX₆TGX₇IX₈GLX₉X₁₀X₁₁ELX₁₂X₁₃LQDWEYKFMX₁₄KYVKVGX₁₅X₁₆ (SEQ ID NO: 52) at residues corresponding to positions 123-165 of SEQ ID NO: 1.

7. The host cell of any one of claims 1-6, wherein the CB5 comprises at most one histidine in one or more of the following regions:
a) a region corresponding to positions 64-104 of SEQ ID NO: 1;
b) a region corresponding to positions 105-122 of SEQ ID NO: 1; and/or
c) a region corresponding to positions 123-165 of SEQ ID NO: 1.

8. The host cell of claim 7, wherein the CB5 comprises no histidine residues in:
a) a region corresponding to positions 64-104 of SEQ ID NO: 1;
b) a region corresponding to positions 105-122 of SEQ ID NO: 1; and/or
c) a region corresponding to positions 123-165 of SEQ ID NO: 1.

9. The host cell of any one of claims 1-8, wherein the CB5 comprises a sequence that is at least 90% identical to any one of SEQ ID NOs: 1-3 and 318.

10. The host cell of claim 9, wherein the CB5 comprises the sequence of any one of SEQ ID NOs: 1-3 and 318.

11. The host cell of any one of claims 1-10, wherein the heterologous polynucleotide comprises a sequence that is at least 90% identical to any one of SEQ ID NOs: 11-14, 22-24, 316-317, and 330-331.

12. The host cell of claim 11, wherein the heterologous polynucleotide comprises the sequence of any one of SEQ ID NOs: 11-14, 22-24, 316-317, and 330-331.

13. A host cell that comprises a heterologous polynucleotide encoding a cytochrome b5 (CB5), wherein the CB5 comprises a sequence that is at least 90% identical to any one of SEQ ID NOs: 1-10 and 318 and wherein the host cell is capable of producing mogrol.

14. The host cell of claim 13, wherein the CB5 comprises the sequence of any one of SEQ ID NOs: 1-10 and 318.

15. A host cell that comprises a heterologous polynucleotide encoding a cytochrome b5 (CB5), wherein the CB5 comprises a sequence that is at least 90% identical to any one of SEQ ID NOs: 1-4 and 318 and wherein the host cell is capable of producing more mogrol than a control host cell that does not comprise the heterologous polynucleotide.

16. A host cell that comprises a heterologous polynucleotide encoding a cytochrome b5 (CB5), wherein the heterologous polynucleotide comprises a sequence that is at least 90% identical to any one of SEQ ID NOs: 11-24, 316-317, and 330-331, and wherein the host cell is capable of producing mogrol.

17. The host cell of claim 16, wherein the heterologous polynucleotide comprises the sequence of any one of SEQ ID NOs: 11-24 316-317, and 330-331.

18. A host cell that comprises a heterologous polynucleotide encoding a cytochrome b5 (CB5), wherein the CB5 comprises:
a) the amino acid sequence
(SEQ ID NO: 54)
ILRVSFRKYRKAIEQ;
b) the amino acid sequence
(SEQ ID NO: 55)
RAFRPSIRFKKSHSTVPT;
c) the amino acid sequence
(SEQ ID NO: 56)
KNTLYVGG;
and/or
d) the amino acid sequence
(SEQ ID NO: 57)
DQATQKHRSFGFVTFLEKED
and wherein the host cell is capable of producing more mogrol than a control host cell that does not comprise the heterologous polynucleotide.

19. The host cell of claim 18, wherein the CB5 comprises:
a) the amino acid sequence ILRVSFRKYRKAIEQ (SEQ ID NO: 54) at residues corresponding to positions 23-37 of SEQ ID NO: 4;
b) the amino acid sequence RAFRPSIRFKKSHSTVPT (SEQ ID NO: 55) at residues corresponding to positions 53-70 of SEQ ID NO: 4;
c) the amino acid sequence KNTLYVGG (SEQ ID NO: 56) at residues corresponding to positions 168-175 of SEQ ID NO: 4; and/or
d) the amino acid sequence DQATQKHRSFGFVTFLEKED (SEQ ID NO: 57) at residues corresponding to positions 203-222 of SEQ ID NO: 4.

20. The host cell of claim 18 or 19, wherein the CB5 comprises a sequence that is at least 90% identical to SEQ ID NO: 4.

21. The host cell of claim 20, wherein the CB5 comprises SEQ ID NO: 4.

22. The host cell of any one of claims 18-21, wherein the heterologous polynucleotide comprises a sequence that is at least 90% identical to SEQ ID NO: 15.

23. The host cell of claim 22, wherein the heterologous polynucleotide comprises SEQ ID NO: 15.

24. The host cell of any one of claims 1-23, wherein the host cell is capable of producing more than 13.5 mg/L mogrol.

25. The host cell of any one of claims 1-24, wherein the host cell further comprises one or more heterologous polynucleotides encoding one or more of: a UDP-glycosyltransferases (UGT) enzyme, a cucurbitadienol synthase (CDS) enzyme, a C11 hydroxylase, a cytochrome P450 reductase, an epoxide hydrolase (EPH), a lanosterol synthase, and a squalene epoxidase (SQE).

26. The host cell of claim 25, wherein the UGT enzyme comprises a sequence that is at least 90% identical to SEQ ID NO: 121.

27. The host cell of claim 25 or 26, wherein the CDS enzyme comprises a sequence that is at least 90% identical to any one of SEQ ID NOs: 226, SEQ ID NO: 235, and SEQ ID NO: 232.

28. The host cell of any one of claims 25-27, wherein the C11 hydroxylase comprises a sequence that is at least 90% identical to any one of SEQ ID NOs: 280-281, 305, 315, and 324.

29. The host cell of any one of claims 25-28, wherein the cytochrome P450 reductase comprises a sequence that is at least 90% identical to any one of SEQ ID NOs: 282-283 and 306-307.

30. The host cell of any one of claims 25-29, wherein the EPH comprises a sequence that is at least 90% identical to any one of SEQ ID NOs: 284-292 and 309-310.

31. The host cell of any one of claims 25-30, wherein the SQE comprises a sequence that is at least 90% identical to any one of SEQ ID NOs: 293-295, 312, or 328.

32. The host cell of any one of claims 25-31, wherein the lanosterol synthase comprises a sequence that is at least 90% identical to SEQ ID NO: 329 or 336.

33. The host cell of any one of claims 25-32, wherein the SQE comprises a sequence that is at least 90% identical to SEQ ID NO: 312 or 328.

34. The host cell of any one of claims 1-33, wherein the host cell is a yeast cell, a plant cell, or a bacterial cell.

35. The host cell of claim 34, wherein the host cell is a yeast cell.

36. The host cell of claim 35, wherein the yeast cell is a Saccharomyces cerevisiae.

37. The host cell of claim 35, wherein the yeast cell is a Yarrowia lipolytica cell.

38. The host cell of claim 34, wherein the host cell is a bacterial cell.

39. The host cell of claim 38, wherein the bacterial cell is an E. coli cell.

40. A method of producing mogrol comprising culturing the host cell of any one of claims 1-39.

41. A method of producing a mogroside comprising culturing the host cell of any one of claims 1-39.

42. The method of claim 40 or 41, wherein the mogroside is selected from mogroside I-A1 (MIA1), mogroside IE (MIE), mogroside II-A1 (MIIA1), mogroside II-A2 (MIIA2), mogroside III-A1 (MIIIA1), mogroside II-E (MIIE), mogroside III (MITI), siamenoside I, mogroside IV (MIV), mogroside IVa (MIVA), isomogroside IV, mogroside III-E (MIIIE), mogroside V (MV), and/or mogroside VI (MVI).

43. A bioreactor for producing mogrol or mogrosides, wherein the bioreactor comprises a host cell of any one of claims 1-39.

44. A non-naturally occurring polynucleotide comprising a sequence that is at least 90% identical to any one of SEQ ID NOs: 11-14, 22-24, 316-317, and 330-331.

45. The non-naturally occurring polynucleotide of claim 44, wherein the polynucleotide encodes a cytochrome b5 (CB5) comprising a sequence that is at least 90% identical to any one of SEQ ID NOs: 1-10 and 318.

46. An expression vector comprising the non-naturally occurring polynucleotide of claim 44 or 45.
